United States Patent Application Publication US 2007/0054278 A1 - sequence listing, part 101

SEQ ID NO: 97621 - DNA, 44457 bp, Homo sapiens
tgcttatggtctggggtggacagagcagactttctggaggagatggcatttgacctatccaaggaggaaaagtcttgggtaggcattcaaagggcacttcttgaaggggaaagagcaccgtgaatgtcagacagcaaaagagaaggctgaccctgggggcagttggctttcaacttgacattcccctcaccctagtatgggctggaatagttagtgaagaccatcttatgcaccagtggtttggggttttggtgttgggtgtgtgagcactgggggaggggcgtggagaggtactccctagttgcttccagctgactgactgctgcggccttatctctagtttgcagggccttgcgggagggccctggaaagtgccttctggcagtgaccccttccccttccccttcttgtttttggtcggatttgttgcctcttgttaaagagacaggctgctggaggcaatttggagttcagggctgaaaggccagctctgagctgacttgaaatttgtacctctgaggaccgctgatggggtataactgtgtgggagacctctgcccttagtgccctaggatggcacttgtccctttggagatagacatataagaaggagttgtgcaatttggtggctttgagtaagaaagctgaattcttcccctggccgcctctcagctgacacggtctcttggatcttgggggtctctcatcccttcctccatgtagggcaggagtcctcaaatggtggccctgacaagtagttattctacctcaactcacttgtcacatccttattatactgagccaagacctgcctctttgactccttaggtagcccaactctgccatctgtgccctggaccccaagcctaccctttctgttcctgaagagcctctcacatgggagaaggatgtcctggagtgtactattagcctataattggtgacaggccttaccgctggctccagtgatcctggcttacgtctgttcttctctcctcagggtcctgctgagctcaggagctgcacggaatggtggcagtcaccttgccagtgcagcaggcatggatcagactgcaagctaggggcacgaggcatcagttgggaagaggggacgcacagctaggcttgaggcctcttcatcggggtaagtaccagggagaagagggggaagtgtgtccagtaagaagcctgagctaaacctgtcaccctctcaggagttctgagagtggtctctatattccattagtccatccagggatttgtacacattcatccttgggaacccatcaaagtcacccctttaggcaaggagagggtctgaaactcagctggaaggaagaagactcattgattcccctgaccaccttttcttctcttctcttacacagatgtccccaggccccccagcccaggcccagcataaaggccgtgttggggggcccccctgacccaaggggggcttcatgcgccacgtgcaggcggagccgtctccatcctcagagccggaggctggcccttcacagcctccagtcaggcagggggccctccagggtggcctgctcatgggctacagcccagcagggggggcgacatcccccggggtctaccaggtatccatcttttcccctccggctggtacctctgagcctcatagggccctgaaacgacaagccccatccactgagggtccccgggagctgaagagaggccctgggctgggggccagagagggactaccccctgaagaaccatctactgtggggctcttaggcccagagggaccggggctgggactaggtgtggccagccagcatttctcccaccgtggcctctgtgttgtggaacagagaagtagtgtcacctcatcttggacttcaggggcctggagtcccccctgccccccatcaaatgcttcctgcaatactttgcacaccagagactgggcctccccagatccagggggacagggttccctgggggagtccccagggccagcccctccaggccagctgcacacacttgacactgatttgcacagtcttgcacaaatagggggtaagagcccagtggctggggtgggcaatgggggtagcctctggcctagggagtcccctggcactgccaatgggcacagtcccgagcacacaccccctggccctggacccccaggcccctgccccaccaagcgaaggctgcttcctgctggagaagccccagatgtcagctctgaggaagaggggccagcccctcggaggcgccggggatccctgggccaccctactgctgccaacagttctgatgccaaagccacacccttctggagccacctgctgcctgggcccaaagagcctgttttggtaagccaataaaggacctcatttactctttttttacttttttttttttttttttttttttgagatgggatctcactccatcactgctggagtgcagtggcacaatctcagctgactgcaacctcctcctcccaggctcaagggatcctccaacctcagcctcccaagtatctgggaccacaggcacatgacattgcacccagctaatttttggtatttttggtagaaatggggtttcgccatgttgcccaagctggtctcgaactcctgagctcaaatcatcgacccaccttggccttctaaagtgttgtgattacaggcgctcaagccactgcgcctgtccttcatgtactcttaagtggatatttgtgtgggtaaaggtggaggcctggggggcagggtgttcctttgagagtttgtgatgagcttctgccccaaaacatacatggccttcaccctgtgtcttttcccaatcatttctctccgtaggacccaacagactgcggtcccatggggcggaggctgaaaggagcccgtcgcctgaagctgtaagtgaccagctttttcctctaccctgtccctgagaatgggggcagaagtctgtactctttccagcatccgagtaggggaccccagggcagaagccctacatagtggcagagggtggagtccaagggcataagcaggaatcccagaatacctcaagccaaccccctgtgtttcccttcctctaccaggagcccccttcgaagcctccggaaggggccaggcctgctgagcccccccagtgcctcccctgttcctacccctgctgtcagccgtaccctgctgggcaactttgaggtagctcccgttggggtttgtgattgccggggtcctgggagaggtgggatggtggaatgtggcttggatggataaggaaaagaattggcatctctctcttcatgtgttttccctaccctaatcccaggaatcattgctgcgaggacgttttgcaccatctggccacattgagggcttcacagcagaaattggagctagtgggtcatactgcccccagcacgtcacgctgcctgtcactgtcacattctttgatgtttctgagcaaaatgccccggctcccttcctggtatgccttgactccaaccccaaagtcagctcatcaagaggatgaggatttgggggcggggccagggggcaagaggtatttcttacttattcctcacctagaagtgagtcagggccaggtgaggagaactctactgtagggcaggggcaggttcagggtgagagcttgtggagagggacatgtgtttagggcccagggttttcctagtccccaccttgactgatggctccctggccttccagggcatcgtggatctgaaccccttggggaggaagggttacagcgtgcccaaggtgggcaccgtccaagtggtgagtttgccctgagggagtgggagtggggagagaggaaagcagccctcaggccctaccaaccttgactgtcctgtccctagaccttatttaaccccaaccagactgtggtaaagatgttccttgtgacctttgacttctcggacatgcctgctgcccacatgaccttcctgcgccatcgcctctttttggtgcctgtgggtgaggagggaaatgctaaccccacccaccgcctcctctgctacttgctgcacctcaggtgaggagagggcccagggatggctggggaggcccaggtatcccctccctgaagaggatctctccttgcttcgatactgtccggattcttgcttagtttatttttaaatttttatgtatgtatgtacatatatatgtatgtattcatttatttttagagatggggtctcgctatgttgcttaggctggtctccaactcctgggctcaagcagtcctcccacctgggtctcccaaagcactggaattacaggcatgagccactgaacccagcctggattcttacgttgatcacattgtcctcctccaggttccggagctcccgctcaggccgcttaagcctgcatggagatatccgcctgcttttttcccgccggagcctggagctggacacagggctcccctacgaactgcaggctgtgaccgaggcccctcataatccacgttattcacctttgccctgattgccagcactctgaacccatgcgggctaatgacctgcccatcctgctccatcttagagaacatatatggagagacagcaagagacccttcaggcttgaattaaagccctcaccatgctcacgcccaaatggattatttgggtgtttaaagcttctgattcttactacaccctgccctacttcgggtactccatgtgcctgtcccctcccttgggtttcccaggccagcttaggtagtagggaggaactggagctaccctgagattttctcaagttcccaggcaagttatgccagcgttgcctccctgtcctgggcaggggccacttgttattttatttatttttaatttataatttattcaaattggattgccttggtaacctcccacacctgataattggcatcactcctccccgcttcccactctcagatattgctccaacctcaggagttgaagaggcttatgcggtgggggcaggaggagaactgctttccctcagctgagggaagaggggctattccagagggactgagtcagtagccaaagactcagcttcccctgtccttccccagtcccttcacttcccctaccctctgacctatctctgaaagccaagttatgcgtatgtgtgtgtgcacaagcttgtctttgtgtggtatgtgtgtgtgagtgtgcatgtatgcacacacacaggggttaaccacccctcacctagggctccagactccagttgtccctctcctcctacctgtgtctccttgttttggggtcctgactgaagaaggtgtccagggggcagagtcagggccaagcactggggtgcctcctctcacctggccagactctgacccacctacctcagctggggtgaggggcacccctcaaactcagtcatgtggttccaaactaccccattccccactccagactctgacccagcctcagtcctaactcctggggctgggctgaggggaacaagcatttgctgaaacttgaaaaaacaaagcaaatcaaaaacaggaaaaaattgtacctggtacttttttttagaaaaaaagattaaaaaagaaagaataaattcttgtttggaaacttgaactaagctctacttttgttgttgttgttgttgttggggagagggtgtgaagggggatggagggccttcctggagctgggactcagccctttctaccagagaggcaacaggcctgggcccatgaggtcttaggctagtccctgctgattcctggggcctggtttttctcctttcggaggggttggtgggtaaagttcagccgtagaagctgaactctgaattgtagatcaggattctaatactggttctattaatgactttagcccctcagaacttcagtgccctcatatgtaaaatggaggtgactacggaggtctcttgactaccagagcattagggatgtgggcaaggtgacatgctccagacaaggttgaacgttgaggctgtttgctggactstatttaagaccgggcataacaaaccttgcttgggaagacagggaaggagctgcagtgtctttgaggaaagaggggaggggaaaatctcggcccaatcgccaggcaatattaggcccagtttccatggcaacgggattggggtcagtccccagtgggwgtcctgggcacaacacagcgggactaccagagaatatcactatggcaaccatggcaacgagtcagctccaatccactagtcgctatggtgacagatgggggcgatactacgctctggtgggcaaactgagtctcgggtgaggacgaataattcagtgcgtggtgtctgagtgataatgcccgcgaaaaatagcctccattttggccatcaggccggggatcttcggcgtgaacagctaaacccagaacaaccacagccttcgcccttctctagaaggtctgcgtttcccagggaacaacttgacgcgccgttcgaccaagtaacgctgattgggtgagtgttgaagcgggggagggagctgccggaagtacatccgggggagcggaactgcaagaggaaaggctcgggtaggcttctgggagcgaccgctccgctcgtctcgttggtkccggaggtcgctgcggcggtgggaaatgctggcgcgcgcggcgcggggcactggggcccttttgctgagggtgagagcgaggcaacctttccagagggtcaggacagagattacctgggttctccgctggaaaagagcgaaattccaacttttggagaggactggggtcagaggtcatggtccccatgtgattctccgaggatcctgagggtcgtggtttatggagatgccttcaggaccgaggggcggcgtgtctggccagatgggatctctgctcaccctcttctttccttcagggctctctactggcttctggccgcgctccgcgccgcgcctcctctggattgccccgaaacaccgtggtactgttcgtrccgcagcaggaggcctgggtggtggagcgaatgggccgattccaccggatcctggagcctgtgagaaacctcttctgcccaccctgggccagccagatgaccaatccctcacgacatgcaatgtcgggaggacttcctttgggcctgcccgcactgttagctcccgactctgtaggccagacctgacagggcccaggctgctgaccatcatccccatgttaccaccttttcctatgcatctcacaggccccattcttgggaatctcccctgcccactctcagccctacctctcagtctgcatagagatggctattctgctggctccgattctcatgactctcccctccattcaggggcctagtcttgcattcctgttctcttgggttttcttaccagtgacacctcagccttctgaggacttatttcttggtaggagctgctgcttttctgggcatgttccatgtgttgactccctacatactccaggactagcttaggtcccaacccaatagttcccagccttctgaggacccatgactcctctttccagggtttgaacatcctcatccctgtgttagaccggatccgatatgtgcagagtctcaaggaaattgtyatcaacgtgcctgagcagtcggctgtgactctcggtgaggggttcagggtgacatgggtgctctgaggctattaggatgtggttgctgtagatccagagcttagtagaaagaactggttgggacctagaggcctgactttccccgttttctctcctggttctacagacaatgtaactctgcaaatcgatggagtcctttacctgcgcatcatggacccttacaaggtacctgtcccctactttatccagccttttsasttgccctcttcactaaaatcttgtgcccaagcttcttacactatccgtgtccatctcaggcaagctacggtgtggaggaccctgagtatgccgtcacccagctagctcaaacaaccatgagatcagagctcggcaaactctctctggacaaagtcttccgggtaagcagatctgagccagagttagggtttgaagacacaaacctgacactcttaatcttttctgaaggtcaagatcagtcccaggcccttctcagtgtaggcccttgataggtaggttgaggctgtggggcttacacctctttttccaggaacgggagtccctgaatgccagcattgtggatgcyatcaaccaagctgctgactgctggggtatccgctgcctccgttatgagatcaaggatatccatgtgccaccccgggtgaaagagtctatgcagatgcaggtgggggccaaggaggggtgggaaaagggcctcagggctccagtaccaggaggatccagacttccctcctgttatgatgggtagagttgcatgtctgtatcagtctcccttggcttgttgattgggattgttgtgggcttccaggtggaggcagagcggcggaaacgggccacagttctagagtctgaggggacccgagagtcggccatcaatgtggcagaagggaagaaacaggcccagatcctggcctccgaagcagaaaaggctgaacagataaatcaggcagcaggtcaggagagggtagaggctgagggaggagcaaggcatgggcctttgaagattggtgctggggcaggatctttggggtactttgacttcatgggtcaagcaagctctgtcccttctcttgcaggagaggccagtgcagttctggcgaaggccaaggctaaagctgaagctattcgaatcctggctgcagctctgacacaacatgtgagaggcccctgggtgggaatggggacaggaattgacagtggaaggggttctcttatctacgcttgaggagagttccgcctctgtgggctctgttgagccagattacatggtcctttttattgtgaactgctttcttcattccccatcccccscttcttctccgtatcggtgatctctgatttttatccccctgtgatcacagaatggagatgcagcagcttcactgactgtggccgagcagtatrtcagcgcgttctccaaactggccaaggactccaacactatcctactgccctccaaccctggcgatgtcaccagcatggtggctcaggttagagctctctgaggacccagcayagagcactggtgccagggaccaaactgagaccccaccaccgtcatcaacacttacataccataaaggtcttcagagtgccttggccctagacctcccttcrttctttgtagagatggaatctaagaatgaaacatctccactcagtcctgcaaatatggaagttcttgagatacctttttttggtagatacttgtgctggtattctgagagtcactttactctgatggtttgcaagattcctaaaatcaactccagagcttacaagacaggtttgagagagggagaaaggaaaaccaacttactggcccccatgccatcttttcccgtttagccattggtaggctgggctgcacctctgtcaagtgtcctcatggtattctctctgttcctctcctcaggccatgggtgtatatggagccctcaccaaagccccagtgccagggactccagactcactctccagtgggagcagcagagatgtccagggtacagatgcaagtcttgatgaggaacttgatcgagtcaagatgagttagtggagctgggcttggccagggagtctgggracaaggaagcagattttcctgattctggctytagcttccctgccaagattttggtttttatttttttatttgaactttagtcrtgtaayaaactcaccagtggcaaaccagaaactgtcctctttgattggggaatgaagttgggaaagtcactagcattttccttggatccagtcctgtcagcatgatgcctccatgaataagagtgaacttcttgtaaagtgaaactatcatttttgtcttcaagagaaactgtgggatagggtggaagtgttaaaccatatgttcactgaactgctggctgggaagtgaagtccccttcctgctaagtgtggggctgtgtgtttgaggcaggtgtttgggggttttttcgtgggaaagaagtactttcatgagaaactactaccctgcactggcatacttaaagggttttcagggactgagggtgctcctcattcatttattcaaaaacattgaatgtctaccaagtgccaagctcattactagacactggattacaaaaatacctgaaacccagtggtccctgctttcacagaatacaaggtcaggtagggaaaacagacaggaagcagacagtgatagaaagtgataaatgtggccgggcgtggtggctcaacacctgtaatcccagcactttgggaggctgaggtgtgcagatcatgaggtcaggagattgagaccatcctggccaatatggtgaaaccccgtctactaaaaatacaaaaactagctgggcgtggtagcatgtgcgggtagtcccagttgcttgggaggctgaggcaggagaattgcatgaacctgggaggtggaggctgcagtgagccgtgatcacgccattgcactccagcctggcaacagtgagacactctgttaaaaaaaaaaaaaaaagtgataaatgctgtggtagaggaaagttctggctgagggatcttggtgggaagagcatatcagcttatgagtagcagcgttgctgattgccactgaactcaggctggaaaagttagcaagttttcaccaagtcaggtcctggactagaataaacaaaggctcactgcttgagagaagttggctgaagggtatagtgttaagggggatgtgactacatggcaagggccaagtcacaaggaatgagattcttgttgaaggggttggacattatccctagggtaatagggattttttgtttgtttgtttgagacagcgtctccctctgttgtccaggctggagtgcaatggcatgatctcggctcactgcaacctccgcctcccgggttcaagcaattctcctgcctcagcctccttagtagctgggattacaggcatgcgccaccatacctggctaatttttttgttttttgtagagacagggtttcaccatgttggtcaggctgatctcgaactccagacctcgtgatctgcccgcctgagcctcccaaagtgctgggattacaggcgtgagccactgtgcccggcctatgaagggtttttttcccttcccatgaagaattttaagataaaacatcacattggccaggcacagtgactcatacctgtgatcccagcactttgggaggctgaggtgggaggatcacttgagcccaggagttgaccagcctgggcaacatggtaagaccctatctctacaaaaaagaaaaaaataacagtaatcacattaatgttttagttagagctgtcttgctgcaatgtggagaagggatagtagggagacacaggaggctgggaggacagtgagaaggctgcctcagtgatcctggagaagggatgaggtctgaactgagataaggggctatggggatgaaggtggragaataactcaactttttttaaaaattaacatattcctttattcgtttggtcagtatgtgaacctcaaatatatgctaggtgctgaggatatcataatgaagaaaacagaattccctgacctcaatgagctcacattctactcggagggkataaaccataaatacgtgtagaatttcagatgctgatgagttgtgctatggaagaaattaaggaagtgaggggaaatttttccagggggtgtggtggtgggaggtgctgaactagtaaagtaggggattgcmggaagccttgctgatgttacagttgagcttcaatatgaaggtgatggagatccatttcggcatcgggaactgaagctgacagaggagatggcaaatgcaaaggtcctgaggcagaactgctgtggatggaacagagttagggaagcaaagaagtggcagctagatgaatcagaaggggaagaggcagatagtgtgcagggccatgtagagccaatgcaagaacttttactctgagatgagaaaccagtggacgggttttgtttctttttgagacagagtctygctctgtyrcctaggctggagtgcagtagcacgatctcagctcactgtagcctctgcctcctggcttcaagcaattstccagtctcagcctcctcagtagctgggactacaggtacacatcgccacgcctggctaaattttgtaatttttagtagagttggggtttcagcatgttggccaggctggtctccaattcctgacttcaactgattctccagcctcagcctcccaaagtgctgggcttacaggtgtgagtcatcgtgcytggcattttttttttttttttttgagagggagtcttgctctgttgcccaggctggagtgcagtggtgcaatctcggctcactgcaacctcygcctcctgggttcgagtgattctcctgcctcagcctcccaggtatctgggatcacaggcgcccgccaccactcccgggtaacttttgtattttcagtagagacggcgtttcgtcatattggccgggctggtcttgaactcctgaccttaggtgatccacctgccttgacctcccaaagtgctgggattacaggtgtgaaccactgggcccagcctcccctcctccactccgaaggattatttgcttaattattcagtcgtaagatttagttacaggctttgaaaggaggagtaatgaaatctcagttggactcagctaagcaaaaaagggaaaataagtattatctccattttacagatgaggtaatgcctaatgatgacaatatgtgcggccaagctaggattcaagtcaagtttgactccagcagccgtgctcttagtcgtaaccatgaatggacagtggttccctgaactcttcctccagcttggtcccctgtccccaattttcaattactaaatatcccatcaaactggggccagccccacgctcctggccaaacttccaccgaggtgccggcagatggcgatggagccaccgacgggccactctgtctggcgcacgcatctctgtgctgccaggtcgcaggcgccgccgccgccgcacttccgggtgccattgcaggtgagccagggtctcccgagaacctcaccccccggtattcccctcaccctgaagtaagggagtctccctcttcccctcagctcctaaccaaggtgctcagtaccgcggctagggtgcccagcgggaggctgggtagttaccggaggaggcagagccggtcgcacgcctgggtcccagcggaggcccagtcgactctcgacccgggccccagcctccttgcgtggcgaaggtcgtgcctcaggtctcctggcgaacctggccgcccggaagcggagagtgactcctccccttcgtcccctcggtgcccgccaggcggcgccgtcggctgggcccggattcccctgcggcttcgatccctttccactgggtattgagattggcgaggggagaggcgcagaaacggcgtgtaagagagcctgactaccaattggaataagtttccctcctgactgttcacatgtacaggcagcattagcatttcctgcctgtacatgtgaacgttcctatgctctacccctcgaagatcctgattcagtagatctggggtgggacctcatgaaacggcgtctccctctgttgtccagactctagtgcagtggttcaatctcggctcactgcaacctccgcctccccgattcaagcgattctcctgcgtcagcctccccagtagctgagactacaggtgcccgccacccatttttgtatttttagtagggacggggtttcgccattttggccaggctggtctcgaactcctcacctcaggtgatccgcccgcctcggcctcccaaagtgctgggattacaggcgtgagccaccatgcccagcctggaaataggaggagagtaatattgcgaggggttggctgtgaaatggtttatctccaggaaggtttccgggaggaagtgattctagctgggcttgtattcagggaccagaatatccactggttctttgccccacagtaatgaatttacttccccacccctatcaggatgcagaaagcctcagtgttgctcttcctggcctgggtctgcttcctcttctacgctggcattgccctcttcaccagtggcttcctgctcacccgtttggagctcaccaaccatagcagctgccaagagcccccaggccctgggtccctgccatgkgggagccaagggaaacctggggcctgctggatggcttcccgattttcgcgggttgtgttggtgctgatagatgctctgcgatttgacttcgcccagccccagcattcacacgtgcctagagagcctcctgtctccctacccttcctgggcaaactaagctccttgcagaggatcctggagattcagccccaccatgcccggctctaccgatctcaggttgaccctcctaccaccaccatgcagcgcctcaaggccctcaccactggctcactgcctacctttattgatgctggtagtaacttcgccagccacgccatagtggaagacaatctcattaagcagctcaccagtgcaggtcagtgtgggccactttgaaggccagaagtaccttggcaaatttcttcaaaatttgaagtcagggagtcagacctttgggtgcccagatrcacacttgattatggtgtagggggacagaggagaagaaagaggccagggccctgctggtagggagctcagtttgggggacagaggagaagaaagaggccagggccctgctggtagggagctcagtttgggagacagaggagaagggatctgggctttgttcctatgaagcttctaatctgaatggagtgtaagttttattcttggagacctctcagtaaaagggagaagggaagaagagaagatgtggatcttggcttgcaagtgtggagaagaaagcagagaaatacaggccctgttcattcactgactgggaagaagcaggatacacccaggaaaaacaactcagtagagatacccagagacagaactaggagagcattttgtaggaaggataagtgtgaggtctgggtggagtacggttatcagggaaagcttcctggtggaaaatgttaggccctgaaggataaggattgctgtatggaattgctgtactttaggttgcatggttgggacttctgatgggtctttaaagggcctcttttcctcttttctcctaaccctgacgtttgctcaggctctgacttctytttcatgtccctgcaggaaggcgtgtagtcttcatgggagatgatacctggaaagaccttttccctggtgctttctccaaagctttcttcttcccatccttcaatgtcagagacctagacacagtggacaatggcatcctggaacacctctaccccaccagtgagcmtggggccagagcacttagttctaagactgggagctggggagaactgctttagtccacaaattctgagccacctatgggtgtaacagcctgggcttgtatccctggacatagaggagtgtcaaagcctggctggggttgaggagtgggtcttagtcttctgtgctcagtgttctccccttcacagtggacagtggtgaatgggacgtgctgattgctcacttcctgggtgtggaccactgtggccacaagcatggccctcaccaccctgaaatggccaagaaacttagccagatggaccaggtgatccagtgagtgtggggtattggctgggggagtgggtttgtgtctgagaatctygaaraagctcttatcttagagcttctttcctggctgaattctstcttctctaggccttctgctgaagctagaggctccatccatcttgattaactcaatgtgtagctttgggcatcaggatcatggccgaagacatgtctctttgcyaaaggtctaggccttactaatggagttatagctggggatgaataggcccctggagaaaaatcttttttctttttgagaaaaatatttatccgtttctactcctgacacatttattggcccccaggggacttgtggagcgtctggagaatgacacactgctggtagtggctggggaccatgggatgaccacaaatggagaccatggaggggacagtgagctggaggtctcagctgctctctttctgtatagccccacagcagtcttccccagcaccccaccagaggtgaggcctgggatgttcctcatctgttctcccagtaatcagcccatgttaccattacagcatcctcatgaatacctctattttaggcccccaaatycatgatcctgggtatcctccactctcatttcttacctaggcccctatgtctgccatcccaaacattgacttcagctttgtgatgaatctgttgaccactgtcattttcctttaggagccagaggtgattcctcaagttagccttgtgcccacgctggccctgctgctgggcctgcccatcccatttgggaatatcggggaagtgatggctgagctattctcagggggtgaggactcccagccccactcctctgctttagcccaagcctcagctctccatctcaatgctcagcaggtaggtragcgggctgggtttccaggtgacagagctagggtgggcatgaaagaagcataatgaaccactcttttgtcctttgactagtcttagtcccaccttccatacctatccctcttccgttatccctcccttccccgattctggacagagtttgggtccttgacttccaggtacccccttttgtaatacctattcttgcctctgccccaatttatgtctctgacctgttccccttggcctctgaccttttctctgccaggtgtcccgatttcttcatacctactcagctgctactcaggaccttcaagctaaggagcttcatcagctgcagaacctcttctccaaggcctctgctgactaccagtggcttctccagagccccaagggggctgaggcgacactgccgactgtgattgctgagctgcagcagttcctgcggggagctcgggccatgtgcatcgagtcttgggctcgtttctctctggtccgcatggcggggggtactgctctcttggctgcttcctgctttatctgcctgctggcmtctcagtgggcaatatccccaggctttccattctgccctctactcctgacacctgtggcctggggcctggttggggccatagcgtatgctggactcctgggaactattgagctgaagctagatctagtgcttctaggggctgtggctgcagtgagctcattcctcccttttctgtggaaagcctgggctggctgggggtccaagaggcccctggcaaccctgtttcccatccctgggcccgtcctgttactcctgctgtttcgcttggctgtgttcttctctgatagttttgttgtagctgaggccagggccacccccttccttttgggctcattcatcctgctcctggttgtccagcttcactgggagggccagctgcttccacctaagctactcacaatgccccgccttggcacttcagccacaacaaaccccccacggcacaatggtgcatatgccctgaggcttggaattgggttgcttttatgtacaaggctagctgggctttttcatcgttgccctgaagagacacctgtttgccactcctctccctggctgagtcctctggcatccatggtgggtggtcgagccaagaatttrtggtatggagcttgtgtggcggcgctggtggccctsttagctgccgtgcgcttgtggcttcgccgctatggtaatctcaagagccccgagccacccatgctctttgtgcgctggggactgcccctaatggcattgggtactgctgcctactgggcattggcgtcgggggcagatgaggctcccccccgtctccgggtcctggtctctggggcatccatggtgctgcctcgggctgtagcagggctggctgcttcagggctcgcgctgctgctctggaagcctgtgacagtgctggtgaaggctggggcaggcgctccaaggaccaggactgtcctcactcccttctcaggcccccccacttctcaagctgacttggattatgtggtccctcaaatctaccgacacatgcaggaggagttccggggccggttagagaggaccaaatctcagggtcccctgactgtggctgcttatcagttggggagtgtctactcagctgctatggtcacagccctcaccctgttggccttcccacttctgctgttgcatgcggagcgcatcagccttgtgttcctgcttctgtttctgcagagcttccttctcctacatctgcttgctgctgggatacccgtcaccacccctggtaaatatctcagctctgattcacttaaagacaatagtgatgtgagttcggcccctcttgttttcaaggaggtgttgctcctyatgttcctgagcttgacagagggtcccatgccccacacaactaggaaggtcttcttggtgtcctctctcttacctgccatagccaagcaaattgatccctcctgttggttcccagggttcatggagaggagagacaaggagtcctctaagactccctgtggaaatgctgcatcctcatgagcacatttcttgattttccagtgatggaagtagtaaattgtgaatatataatggcactgagctgtatgtgtttgagagaaagaaagagattggccatagcaggattcagataagcctgatggcgcttttgtaccacagagagaattagaataacagaatgttgactgtaaggaggttgggctgataggcatktgagtgtgtatgagaattgatactgaagtagtaggagtatatgattgtggagcagtagcctrtggattagggaataagaagtgactgkaacgtggcatatcttttcttccaggtccttttactgtgccatggcaggcagtctcggcttgggccctcatggccacacagaccttctactccacaggccaccagcctgtctttccagccatccattggcatgcagccttcgtgggattcccagagggtcatggctcctgtacttggctgcctgctttgctagtgggagccaacacctttgcctcccacctcctctttgcaggtaccccctcctccttcacttgcttccattgtttactctggctttgtggaaagaaaggaaacccctggatttgaatggagagatatgggtttgttggatctttggcaccccttggcctaggctaattggaacctgagccagccagggtggcctgttgattccagccataccctctcttgaggcagtaggttgcccactgctcctgctctggcctttcctgtgtgagagtcaagggctgcggaagagacagcagcccccagggaatgaagctgatgccagagtcagacccgaggaggaagaggagccactgatggagatgcggctcygggatgcgcctcagcacttctatgcagcactgctgcagctgggcctcaagtacctctttatccttggtattcaggtgggtgtaggagagagatcagggagttggtgttttttctctgtgtgtgcatcactttctttcagaccttcaaaaccgtgggagagagccttgactgagtttcacataagtgaagtggttgcccaagcccagtggcctcaaatggcagttctgagacttgaacctgggtctccttaatcctagtcctggatcatttcccctctacaacctagatctggaccccgctagttgcatttgaggattactctatcagtggacagactggaaaaactgaggtgatagccaggattttcttcccaaactgtggtcatggatcctcttcctttcctccagaggcagatgtggcactgatatcttcctccatcctgggggcacagcctgagtgttagcattgcagatggatactgacttgcccaaagtcacatagtgagtcagtgcttggggcagggcaggaagtaggtctcctaactcctagcccaggacatgcaatattttttccactgacatgcactattctcctgcttccattttttacaggggcctatagaaactctccttttgctcygcttcctcctctccttcacaagtaacgtggcccctcctctcctcctctagattctggcctgtgccttggcagcctccatccttcgcaggcatctyatggtctggaaagtgtttgcccctaagtgagtagatttgcttgagaagtagaggtggtggggagggagaaacttggaacaaagtatgaagatcctaaacatccaggatggccaaggttttgcctctacagggaaaaggcagtagacctactctgttgcctgagattctccgcctttctttgcaggttcatatttgaggctgtgggcttcattgtgagcagcgtgggacttctcctgggcatagctttggtgatgagagtggatggtgctgtgagctcctggttcaggcagctatttctggcccagcagaggtagcctagtctgtgattactggcacttggctacagagagtgctkgagaacagtgtagcctggcctgtacaggtactggatgatctgcaagacaggctcagccatactcttactatcatgcagccaggggccgctgacatctaggacttcattattctataattcaggaccacagtggagtatgatccctaactcctgatttggatgcatctgagggacaaggggggcggtctccgaagtggaataaaataggccgggcgtggtgacttgsacctataatcccagcactttgggaggcagaggtgggaggattgcttggtcccaggagttcaagaccagcctgtggaacataacaagaccccgtctctactatttaaaaaaaagtgtaataaaatgataatataattatgtgtgtctgagatgtgggggagccccactgttctataggggttgtgaggaggatcagtctctcctgccaccaggcacagatgagatcagtcatcttaggaaagcctggctgcacctgagaacctttatgaagtggttggagttgtctgaattcactgcctccacctcttcccaaatcaatcctattatcccaccgctattttcctttgccatgcaacacattttgttaagttcctgttctttgtctgataaagagagaagactgagaagacaagcccaggcatcatgcagcaccgactttaactgtctgaagccccaaatagtgctatgcccccgctccactgggccttttcactatagaacaccctttgcccttcccttctgtggaagcctcccttgtttcccaacctgtgccactctttatcagatctacatgcccatcttatgtagcattccaccttgtcccattcattattcctgacttgaagccaaaattgtgtgaatccactggttcttttctcatgtgtatgttttgtgccctcygttcaccccagcactcctgtcatgtttgaaatgctggcatgaaatcctcctagagatgtccatcaaaagagttgggaagaggccctggagagaagcatcaggactgggatttgaggtttgacagtacctagaacaagaggagctgataccactgaaaaacagaacagatgttaaaaccatgggatagcacctacttttagctggcataaagtagagaagctgagtagtagtggttgtgaagtataaacgttcactgctgtggtaggtagctaagggaagaattgaaattatttttattgttactatcattttaaagacatatttttgctctattgtccaggctggagggcagtggtgcaatcatagctccctgtagtttcaaactcctgggctcaagtgatccatctcagcctcctcagtatctgggaccatgcctggctaatttttaaatttctgtacagacagagtcttgctacattgcccaggctgttcgtgaactcctggcctcaagcgatccttccaccttggcctctcaaagcactaggattacaggtgtgagccacagcacctggctaagttcagattattaatggccagtggtccctagtgttacagatgccaaatagtaagatgatgaaaagtatggttcagctgggtgtggtgcctcatgcctgtaatctcagcactttggggagccaaggcgggtggatcacctgaggtcaggagtttgagaccagcctggccaacatggcaaaaccccatctctactaaaaatacaaaaattagccaggtgtggtggtgtgcacctgtaattccggctactcaggaggctgaggcaggagaatygcttgaacctgggaggcagaggttacagtgagccaagatcacgctactgcactccagcctgggagacagagccagactctctctcaaaaaaaaaaaaaaaaaaaaaagggataggttgttaaccatggtagaaagaggtttaataatgcaagggggtgaagttggccccagctggcctgtaagatgaattagaaaaacgcttctccccaagtctggtggacacaactcccaagcatagttcggtgagcaaatggtgtctttttgagaaaggggaaaaaaaccaaaacaaaaacctttcctccatccctagcacccatggaaggattttaggccctagttcctccacttctcagccaggtaccctgcactttttgcagtagcctccttgcctggagcctaaggctaatttgctgatctgccaaccactgtctattctttctcctggtgtatctataagattctattagataaagacattagtacattgatttacgctattaaaaattatttctagccaggcactgtggcatgtccctatagtcccagctacttgggaggcagaggtgggaggatcacttgaggatagcaagactccgtctctacaaaaataaaaaaattagccaggcatggtcccagctatgtagaggctgaggtggatcacttgagcccaggagttagaggctgtagtgcacaatgaatgcacctgtgaatagccactgcactccagcctgggcaacatagatcctctctcttttaaaaagaaaaattatcttatccctcccttttccttgaaatcagagtccattccacactaactcaatgattctttttttttttcctttaattttttgtagaggtgggggtcttgctgtcttgcctaggctggtcttgaactcctggcctcaagccatcctcctgcctcgacctcctcaagtgttgggattgcaggtgtgagccattgcacccagccctgattcttttttaaaaaagctttattgaaatgcaatttaccataaaatttacccaygtaaggtgtaagatttaatggtttttgtgtatttacagaattgtacaaccatcaccagaatcaattttagaacattttcaccaaccccaaaagaaaatctactgtttagatatcaccctccaatcctccccaacccctggctagcactaatctgctgtttctctatatatttgcccattttggatatttcacagaaatgggatcataataatatgtggtcttttgtgactggcatcttccasttagtataatgttttccggtttcatctatatagcagcacacagcagtacttcattctttttcttttttaaaattgaagtaaaattcatataaaattcaccattttaaagtgtataatttagtggccgttagtacattcacaacgttgtacaattatcatcattatcaattccagaatgttttcattaccccaaaaagaaaccctgtacccttaagcagtcattccttctcttctcccccttaactcctggtaccactaatttgttttctgtctctatagatttgcctgttctggacatttcatataaatgggctcatacagtagtgcctttttctgtcttatcttcctttactcagcctaatgttttcagagttcatctatgttgtagcatgtattggtacttcattcctctttatggccaaataatactctattgcatggatataccacattttgtttatccattcatccattgatagccatttggatttacacattttggttattatgtaatgctgctataaacatttgtgtataagtttttgtttggacatatgttttaatttctcttgagtgtatacctagctgtacactgagcaactgctgggtcataaggtaactctgtttaatcttttaaggaactgccagtttgttttccaaagttgctgtatcgttttacagtcttaccagaagtatatatgggtaacgatttctccacatccatgtcaacacttgttgtcatctgtctttgattctaaccatcctagtgggtgtgaagtaatatctcattgtggttttggtgtgcatttccttaatgattaatgatgctgagctgagcatcttttcttgtgcttactggagaaatgtcccttcagattcttygactatttttaattggattattgttattattattatttttggaccagggtcttgctctgtcacccaggctataatgcagtggygtgatcatggctcactgaagccacagcttcctgggttcaagcagtcctcctgtctcagcttcctgagtaactgggactacaggtgtgcaccaccatggccgactaattttttattttattgtagagacagggccccactatgttgcctaggctggtcttgaactcctgggctcaggcaatcctcctgcttcagcctcccaaagtgctgggattacaggtgtaagccactgtgcctggctagcattctttttacatgctagatacaggtccctgaacagatatatgatatgatatgatatatgatttacaaatgatatatgacttacaaatattttctccactctgtgggttgtcttttcattttcttgataatatcctttaatgcacaaacattctttttttttttttttttttttgagacggagtcttgctctgtcgccaggctggagtacagtggcactatctsggctcactgcaacctccgcctcctgggttcaagtgattctcctgcctcagcctcctgagtagctgggactacaggcgtgcatcaccacgcccagctaatttttgtatttttagtagagacggggtttcaccatgttggacaggatggtctcaatctcttgaccttatgatccgcccgccttggcctcccaaagtgctgggattacaggcatgagccaccgcgcctggcctacacaaaaattcttaattttgagaaagtccagttcatcctgtttttttctttcattgcttatgcttttggtgtcatatgaaataaattattgcaaaatgccacaacttaattttagaacatttctatcatccccccaaaattccctacattgactccctaatcctaccccaggccaatgatctgttttcggkcttttatttatttatttatttatttatttatttagagatggagtttcactctgttgcccaggccggagtgcagtggcgtgatctctgctcactgcagcctctgcctcctgggttcaagtggttctcctgcctcagcctcccaagtagctgggactataggcatgtgccaccacgtccggctaattttttgtatttttagtggagatggggtttcactatgttagccaggctggtctcctgccctctggtgatccgcccacctcagtcccccaaagtgctgggattacaggcatgagcctggcctgttttcaatcttttttttttttttttttttttttgagacagtcttgctctgtcgcccaggctggagtgcagtggcgcgatctcggctcactgcaacctcagcctcctgggttcaagggattctactgcctcggcctcccgagtagctgggattacaggtgtgcaccacgacgcctggctaatttttgtatttttagtagagacggggtttcaccatgttggccaggatggtctcaatctcttgacctcgtgatccgcccaccttggcctcccaaagagctaggattacaggcatgagccactgtacccagcctgttttcaatctttataagtttgtaatcctagcactttggaaggccgaggccagtggattgcctgagctcaggagttcgagaccagcctgggcaacatggtgaaaccccgtctctactaaaatacaaaaaagttagctgggcgtggtggtgtgcacctgtaatcccagttactcgggaggctgaggtaggagaattgcttgaacccaggaggcggaggttgcagtgagccgagattgcgccactgcactccagcccgggcaacagagcgagactccgtctcaaaaaaaaaaaagtttgttggtgcactcttttgccccttttcattgctaaatcattggctttgaccaactgatggacattttgattgttttcagtttttagcyattatgaacatttttagctactatgagtatttgcaacaaatctcagtgtggacgtatgttttcatttctcttgggagtattctttggagtggaattgctgagtcttatggtaaatttgtgattgacttttttttctttttttttttttgagatggagtcttgctctgtcacccaggctggagtgcagtggcggggtcttggctcactgcaagctccacttcctgggttcacgccattctcctgcctcagcctcttgagtagctgggactacaggtgcccgccaccacgcctggctaattttttgtatttttagtagagacggggtttcactgtgttagccaggatggtctcgatctactgacatcgtgattcacctgccttggcctcccaaagtgctgggattacaggaataagccactgcgcccggcctatgattaactttttaagaaactgccaaacttttctgaagtgagtgtactattttatattcccaccagcagtgtatgagggttcctcatacacatcctcaccaacacttggtataatctgtttttattgtagtcattttatgtatgtatgtgtatagtgtttttatttttatttatttatttttgagacagagtctcactctgtcacccaggctggagtgcagtggcatggtctcagctcactgcaacctccgtttcccaggttcaagtgattgtcatgcctcagcctcctgagtagctgggattacaggtgtctgccaccatgcccagctaatttttgtatttgcagtagagacagggttttgccctgttggcttggctggtctcaaactcctggcctcaagtgatccacctgcctcagcctcccaaagtgctgggattaaaggtgtgagccaccacgcccggctgtgtgaagcgtttttttattttttgagacgaagtctcgctgtgtcacctaggctagagttcagtggcaggatctcggctcactgcaacctccaccttccgggttcaagccattctcccacctcagcttcccaggtagctgggattacaggcatgcaccaccatgcctgcctaatttttgtatttttagtagagacgaggtttcaccaagttggccatgctggtcttgaactcctgacctcaagtgatccatccacctcagcctcccaaagtgctgggattacaggcataacatggcccggccctggccatgtttttaactgtgtttctctaatagctaataatgccgagcatctttttatgtgtttcttagccattagtagatcttttttggtaaaatgtctttttttttttttttggtccatcttaaaattgttttttgttttgttttgagacagggtctcactttgttgcccacgctggagtgcagtggctcaatcatggctcactgcagcttcgacatccctgagctcaggtgatcctcccacctaagtttcccgagtagatgggactacaggtgtgtgccaccatgcccagctaatttttgtattttttttgtagaggtggggttttgctatgttgcccaggcaggtcttaaacttctgaggctcaaatgatcctcccacctcagcctcccaaagtgctgggataacaggcatgaaccaccacacccagctaagattgtttttaaaaatctttttcttgagttttgggagtttttatgtgttagggataccagtcccttatgaggtatataattagcaagtagtttctcccactctgtgactgtgacctttctttttttgaggcagggtctcactctgttactcaggctggagggcagtggtgtgatcatggctcactgcaacctggaactcctaggctcaagggctcctcccacctcagcctcccaagtagctgggtctacaggtgtgttattgtgccagggttaatgttttaaattttttgtagagataatgtctctacaaaagacaccatctttgttgcctaggctggtcttgaactcctggcttcagggaatcctccagcctcagcctcccaaagtgctgggattacagcatgagccacatccagcctatgatttttcttcttttcttttcttttcttttyttttttttttgagatggagtctcgctgttgcgcaggctggagtgcagtggggcgatctcggctcactgcaggctctggcccgcggggttcacgcctttctcctgcctcagcctcccgagtagctgggactacaggcgcccgccacatcgcccggctaattttttgtatttttagtagagacggggtttcaccgtgttagccatgatggtctcgatctcctgacctcgtgatccgcccgcctcggtctcccaaagtgctgggatcrcaggcgtgagccacggcgcccggccccagcgtatgacttcttaatgatgtctttgtagtacaagagtttttaattttaataaagttaacttttttttaaattgtacaagcttttagtgctgtgtctaacaacttgttgccaaacccaaggtcataaagctgttctcttacgttttcttttttttttttttttgagacggagtctcactctgtcacccaggctggagtgcaatggcacgatgtcggctcactgcaacctccgccacccgggttcaagcgattcttccgcctcagcctccggggtagctgggattacaggcgcacgacaccacgccctgctaatttttgtatttttgtagagaaggtttcaccatgttagttaggctgctttacgttttcttttagaagttttatatttttggctcttatatttagtttgtgatccattgagttgattttatgtacgtatgtatggtcgcgttcttttctttcctgkcttttttttttttttttttttgcatatggatattcaattctcctagctccatttaatttgaaatgattgggcaggtacttttgagcagtgcaagtacagagcggcactgccagcagactacacgcggtagaaagccgaccttggtgagcgtgttggtgctcgacagtgagcagagaaaggatggacgattacggagcgccctcgtctccagttaccgctttctggaaacaccatccgccggggcggagctgttccgccccggtgcggtactacgactcccagcatgcacctcgcagtcggccctcggtggaagcgggaacccaggaggacctgggggtgtggcagcgaggaagggccgagccacggactgtggggccgaaactcgctcccgcccaccctttctcgaggctgtggcctccgcgrgagccgagcgggccgcaccgccggccgtgcgactgccccagtcagacacgaccccggcttctagcccgcctaagcctgtttggggttgctgactcgtttcctccccgagtttcccgcgggaactaactcttcaagaggaccaaccgcagcccagagcttcgcagacccggccaaccagaggcgaggttgagagcccggcgggccgcggggagagagcgtcccatctgtcctggaaagcctgggcgggtggattgggaccccgagagaagcaggggagctcggcggggtgcagaagtgcccaggcccctccccgctggggttgggagcttgggcaggccagcttcacccttcctaagtccgcttctggtctccgggcccagcctcggccaccatgtcccgccagaccacctytgtgggctccagctgcctggacctgtggagggaaaagaatgaccggctcgttcgacaggccaaggtaacacggttgctggcaccctcggtttgcagcctcaagatccctgaaagcgggtttgcagtggatttaccccaacmgatggggagggactgagcttgaccaaagagccagaaatgactggagaatgcatcccttgccactgctgcaaggggagaaaaaaggattgatcctcagtgacaacccctccctcatgtggcaggtggctcagaactccggtctgactctgaggcgacagcagttggctcaggatgcactggaagggctcagagggctcctccatagtctgcaaggtaggcgggtcctccccaggatggtcagttcccctcttccatagccagagaaacatccgctcctgcgtttttgggatcgatataattactcggggcagggagtcctgtttaaggcacagaggagactggagtggaatcatctttgtacaggcaaatccctctcttccttacacactcacagagtggcatttgaaaaatggtttccaagatggtctgatctggataacttttttgccctttccagactctctgtccaaaggttgggttctttttttaaatccttagctaattggctggagggtrggttctttattgtagctgttttggttggagtggggtgatctctgagttgggattttatttggaggatcttccatgggggagcagtctgtaagaccaacattgttgctccagggctccctgcagctkttcctgttcttcccttggagctgactgtcacctgcaacttcattatcctgagggcaagcttggcccagggtttcacagaggatcaggcccaggatatccagcggagcctagagagaggtgagggccagagattgtccctgattcccctgccatcttcagtctgggtttaagttattgcagggagatgggaggataaacaacatctgtcacctccatggagagaggtgcccttctctgtgctcttcagaccaggttgaggtattattattgtgacctttggggtcctgcaggagaggaaagccagagtgtgtggggagatggaggatgaggtgctacttcagctgtgtgtgtgtctatgtgtgtgtgtatactctacagtgctgkagacacaggagcagcaggggcccaggttggaacaggggctcagggagctgtgggactctgtccttcgtgcttcctgccttctgccggagctgctgtctgccctgcaccgcctggttggcctgcaggctgccctctggttgagtgctgaccgtcttggggacctggccttgttactagagaccctgaatggcagccaggtaatagggaaagtgacctgaagctgagggtctcctcyttccttcctcctcctttctctccagctgcagtagcatcatcatgtactggacaggcggctgggttggtggtcggaaaacctggattctctctgggactcttgggtgaccttgccctggttggtctctcattgtggggattctcttaggagtgttttttaaaaattggacaggcatggtggctcatacctgtaatctcagcactttgggaggctgaggtaggaggatcacttgaacccaagaggtggaggcaacagtgagttgtgagctatgatcacgccactgcactccagccctgcagcctgggtgacagagggagaccctgtctcaaaaaaaaaaaaaatttttttttggatagggatagggctcttgtgatcttgctcaagtcagctctcagccttagtctccttattagtaactcaaatatggtccttgccctgagtgaggaggcacgctggaatagatcatcactgccccaggtttttcttccttttttttaattcttgcctcatagctatctatctcttagaattgggggaaactacaggcattatgcatagcttcttgctttgtaagggtagctgaggcctgtgtcctcaaggatcaagaggacccttgagctcaaggtctagccaggatagatggagataggagaagacgrggaggttgtaggcttggagcttctggttgtccttctttccccagagtggagcctctaaggatctgctgttacttctgaaaacttggagtcccccagctkaggaatkagatgctccattgaccctgcaggatgcccagggattgaaggatgtcctcctgacagcatttgcctaccgccaaggtcagctagcarcctgactcatctcttctacctttaagtggtcctccagactcatgcyctctctcttgtcccattcagttccatgggcttcttagacccttgttccccatcatgacccctgctctatagccctctccaagctcacaccctgactgtcctcaggtctcyaggagctgatcacagggaacccagacaaggcactaagcagccttcatgaagcggcctcaggcctgtgtccacggcctgtgttggtccaggtgtayacagcactggggtcctgtcaccgtaagatggtaaagacagtcctagggtggattggggaaaccacaagcattatgtatagctttttgctttgtaagggtagctgaggcccgtgtcctcctatccctttagggaaatccacagagagcactgttgtacttggttgcagccctgaaagagggatcagcctggggtcctccacttctggaggcctctaggctctatcagcaactgggggacacaayagcagagctggagagtctggagctgctagttgaggtagggaactgccaggtgaagatgtggggtggaggattcctgaggtgcttgtgatggggtgacttgactagtcaagatccaagtataaggaagtatggctcccaaagattatagatacaatttttttctttctcttttaggccttgaatgtcccatgcagttccaaagccccgcagtttctcattgaggtagaattactactgccaccacctgacctagcctcaccccttcattgtggcactcagagccagaccaagcacatactagcaagcaggtgcctayagacggggaggtgaggttccccttgctcacctgagcttctcttcccacttctgatgcctcccctggggtgtgactctgcttttgttcttgtgacttgggggatgaatgaggcagtggcaggacataggtcgccactcctcagcctcttaccttgcttctagacctgaactgaggactcttctctaagacattaaccttctctatctttgacactctgaagtctcttccccagtccattctgtaactggggtagatccatactgagccaaaattggagccctaagaccttccctccctttctcctcctcagggcccatgaacatccatctgttagctaagagagaacattctcaggacccttgcaggttccctgctagggcctagggtgaggcttatgggcttttactcctcagggcaggagacgctgcagagcattacttggacctgctggccctgttgctggatagctyggagccaagggtgggtgtgtcttcaagcttctctgcaatggggtagacgggttggtgtcccctttgaaatacagcaagactgcaattttttgttttttcctctattctgtctgtccagtctgggggcccaggactctgcatggtaccagagcctggtgaagaggttggggatggtggctcatgcctttcaagacactgcttcttcttcccactccagttctccccacccccctcccctccagggccctgtatgcctgaggtgtttttggaggcagcggtagcactgatccaggcaggcagagcccaagatgccttgactctatgtgaggagttgctcagccgcacatcatctctgctacccaagatgtcccggctgtgggaagatgccagaaaaggaaccaaggaactgccatactgcccactctgggtctctgccacccacctgcttcagggccaggcctgggttcaactgggtgcccaaaaagtggcaattagtgaatttagcaggtgagcccggggtcctagagggggtgtggagggatgattttctgattgggacctgagttggtgagctccatgttcacctacttaccctagagtttctgaaattgattcctcttcacccctgttctgtgtcctacttcaggtgcctcgagctgctcttccgggccacacctgaggaaaaagaacaaggtgatctaaactttcagttttcctcttacctcctggaagtggtagtggtggaagtgggttccctttaatgtgtcccagcccaccaggagacttaagagaaagggactgtggacacaagaagaaatagaggaggatttggggttttggtgactgtgaggctgggaagacacttcttgactttgggagtggtccccaggggcagctttcaactgtgagcagggatgtaagtcagatgcggcactgcagcagcttcgggcagccgccctaattagtcgtgractggaatgggtagccagcggccaggataccaaagccttacaggacttcctcctcagtgtgcagatgtgcccaggtatgtrtacttgcatgacgtcggctatgcatagatgtgcaaggacagagaggcccatgggaaatacttgggcgtaagtgtaagagtggtgttctcagacaggaggggtgattggggttgtgctatatatacctagggatatatccaggtgttcaaatatacacagtgtrtatgcagggctcccaagagttccctggtttccccgatatcctcagacacaaagaccatgactctgctgttgtgsgttgcacaggagtagggggcagatgatggacactgggatgggaatggttgtgaatgatctgcccccgcttccatatgtgagtgtaggcaagatacttcctctctctaggcctcagtttccctttttataaaacaatgcctaagactatgtcaagttctaagactctgtactctgggctggggctacaggtaatygagacacttactttcacctgcttcagactctgaagaggctagatcggagggatgaggccactgcactctggtrgaggctggaggcccaaactaaggggtcacatgaagatgctctgtggtgaggctcaggcctgctggcttggggctgaggggcagttggtgtcctagagtccttggacctattgtgggtggtgaacactgaaagcgggggtatggctgcccagctttctgccaatctttcacccttaggcatcatccttctttctctccaggtctctccccctgtacctagaaagctatttgagctggatccgtccctctgatcgtgacgccttccttgaagaatttcggacatctctgccaaagtcttgtgacctgtagctgccacgttttgaagagcttgagctgggtccccagtgggctgtctctctgtggggagggctttctgcttcaccatcattaggaatgtgaccattcctatataattcctggactggtgagattggtggtaggcctgtgaaatttgccctagttactaccattctcgttttggaggaaacaatctctgccaccaccaagtcattgactttgctcgaggcaccttttttcctgtttctccttttctgttgtcgagtaaaatttcatatttatctcgtctgcctactacatatacttgcgtgggaaggcttgtgaccgtctagttgagtgctagttgtctatgatgccctttcctgacatcgtctaccttatgaacttgaagtctgggtatgaggaaagggctacaggaatcctcactttggaggcagtggctttagtccttcacattgcctgaatgcagagccccaaagcccaggacagtgacaatgagtggagttgggtctgaagggtggtctagataggcctctcaggacaagggcaggtacctgttacttagagacaggcaggtttctctcagagtaactcttcactcccttcctaattccaaattctagaaattcgactcgtcttagtcaaatgtgtctgtgtgggtacagggtgaaaggtgaattgagtcagcatatcaccaacagctgcctgttgactactaacagggacccctgttatttggggcccaaggattttcaagtcccagcatatgcagttttcttgctaatttgggttctactgaattggctgtgtgttctgtggttgccctttgacttctctggatttgagtgccttattataaggtattaatattaatgacgggaggaagaaaggcacaagcgctgagaaactgcaaaggctgtgggattggggttaccagagggtgcagtgacaatggggtaggagtggggtgctagtcagaaagttcagagtaggggtggttggaggcagcgttgagaaggagcaagaagtgtcagggtggtgatggcgtcttagaagatctccaggttttgggagaagatgggtgtatgggttaccacaataggactagactaatacaagggttcagtctattgtgccacgttcttccaggaggataaactccggagccaatgaactggagccaagtgggagagtccgcctctaagggattaaagggtctcctttcactaatcgatctcgccctattcctttcgttgattggctgagaattccaatccgtcgaggaagcgtagcgttgcggccaattgacgtggcgttactaggcgtgtcgcatcactgaggcgggagccaggccgcaagcgaatttcctgattggctgtgatctgcgggttgctggggagaggcscggagaggcgggcgagagtccgcagggcaggcgctgattggctgaggtgggagcagcttcccttccgatgattcggctcttctcggctcagtctcagcgaagcgtctgcgaccgtcgtttgagtcgtcgctgccgctgccgctgccrctgccactgccacctcgcggatcaggagccagcgttgttcgcccgacgcctcgctgccggtgggaggaagcgagagggaagccgcttgcgggtttgtcgccgctgctcgcccaccgcctggaagagccgagccccggcccagtcggtcgcttgccaccgctcgtagccgttacccgcgggccgccacagccgccggccgggagaggcgcgcgccatggcttctggagccgagtgagtgtgcgcgcgccgttcgcttgctgcggcggcgcgcaccgggaccagccgcgcagggtaggcccggcggggcctggccgtgggcgcgtcagagaggtggagaccaggaaagagggaagggaagctagggggcgagtgaggggccgtggacccggcaggcccggctggggccagctgcgcacccgcgcgccccctaggcggggcttgcgttgggtccgggtcggagcctgggccggatcgtgctgtgtcatgcaggccccggcccgcccgattggctcccttagaacggacgtctgggcctggccaggtcttccggcccactccgccggsgcggcgccccggggctttggggcgccagtctgccgtccggcctaccacccgccgaaagcctttggtccccggagagagcaggccccgcgagcccgaggccccagccgggcccggtgggcgtggactttgcgccatgtgaaggcctcaggagctctgccaccgaggcggagcccggggtcggggaaggcccgccgagctcagggaagctcacagccgcctttttggagccgggtcggcggggccggaggtgggcatcctctgtgtgtgacctgagtcgtgaaggactgttagggagagggcgagccctacctttcgcttctggtcttcttactttaggcctgttgttcatactagaaagtttgagccagttttccttaatgttatgactcgtgggtggggagaaaggaatttttctttaacattttaggttcttgctaaagttggaatctcagttcgtgttttgtgcgcctttccagatttccaggtttcgtggtgtgcagtttagagttgcactaactcttcaaaaacacaaacgtgcgcgcactcctttccccaaccagctatattgagaaattacccgggctctggggctttctgaccccacctccatccttaggaaagcgttagataaaacttggctacctcagcccattcaatttagaatagagagcttttagaggcaaaaaaaaaaaaaaaaaaaaaacacagccagcccaaggaaactctatgcaaattaccttccttccttgaagagattagttttttgaggtgtgttcctttttctcaagtttctgaattcggataaagtattactcagttgcttatttaaaagagtcacttattctgaaagtattcttttggtttatatgcagtcagcctcttattttcaaaagtaaaaatctaaaattcttggaacctggcatcatcagctgtttctaacctcttggtcaccttgatgactcttagctgaaacccttccaagtcccgtggagtcccctgtgcagttctggaaagggattgacttatacagaagacaatggaggattgccccaaagagtgtccagaactgctgttggcccatggtcaggccaaattcagtcttttagagattaccacatctgatctcagtaggtagatggggaattagaggctttaccttaagaaaagggcataccactcatctccagagccagagtccgggatggtaggcagaatggaggttttcctaggatacagctttgagattaaaatacaaactattgaccgggcacagtggctcaggcctgtaatcccagcattttgggaggccgaggcaggcagatcacttgaggtcaggagtttgagaccagcccgggcaacatggagaaaccccatctctattaaaatgcaaaaagtagccaggcatggtgatggtgcacacctgtagtcccagccactctggaggctgagacaggagaatcacttgaacccagggaggcagagattgcagtgagggagatcgcgccactgcactccagcctgggcaacagagggagactccgtttcaaaaaataaaaaactatggtgactagaggcatctggcgttttatttttctccagtcccagttctataagtcaagcaagaagatgggcagtccctggaagagtattttgatgggacaggagtgggagagctcgtgggtttacattgctctcaactgtcacattgagcatgcttggcctctagtgtgttgataagcattggaagagtctgcctactcagcagcattgtgcctggagtggcagacttttggaatgggggaagcaaatttgagcagaggaaactgtcgttagaaactagtttagaggcagtggttaaaaatgcagcctatgtgtgagggttagcagaaggcctaccattttgttagatgaatggggtttgtttttctcttgggtgtatcaggacccaaagatgtaagaaccccatggcttcctagctgagcacagcatttttctttgtctcttgcaaattgtgaggatatttccaatgggaatactattttgtcttgttttgttgacttcagtatccccagcccttagaacaatgcctggtacataatagagactcatgaatttgttgaatgaagaaattcgttttaaaaatttattttctttgcttccttcattgtctggccttcctactttggttaatgcttatgttttcctgagccttactaacacgaggccgctcttaaaaaagagagagcgctgggtgctgtggctcacgcctgtaatcccagtactttgggaggccgaggtgggcagatcacctgaggtcaggagttcgagaccagcctgaccaccatggtgaaaccccatctctagtaaaaatgcaaaattagccagttgtggtggcgcatgcctgtaatcccagctactcgggaggctgaggcaggagaatcacttgaacccgggaggtggaggttgcagttagctgagatcgcagcattgcattccagcctggacaacaaaagcgaaactccatctcaaaaaaaaaaaaaaaaaaaaaaaaagggagagggagcttgctgagtctagtaagtgacagctggaaacgggctaggtaataagttggtgtcactgtctggtgaatgatcctagcttctaggaaataacactgagtgtagacccagtcgactttgatttgggtgagagggatttggatttgccccatgtctcagcatttcttggttttgattttttgagccaactttatggaattgtgtacttttgcagatattactgtgaagttccttttgaccttgagcctctttctggcggtttgatgtctgttagtgttttttccaaatatgatggtctttatgcttggcattcctttggtactatggaatgccctggcatcagtaggtttagcctataaggagggtagcaccaatgattctgcttcgttgtccccaggcttgcttggtagaacttaaggcctccctgagcctcaagggaggttgtctggcttacttaattccctggaaagttagcttatgctttactctatactgttaatcatggtgaccattaataccatgtgccaggtattatgttaagcattttacattcattatctcccttaagacaataagcctctgagataagtattatattccttcttttatagaggaggacatcaaagttcagaggttaggtaacttgcccaagatcacaattaagcagtggcataattggaattcagacccaatgggtctgactatagagttcctgctcttaaccactcttctgtaagtctaagactatttttatttctctaacaactattcagcctccatttctattatgtcttcttcttaggccattattttctgaccctggggcaggatcactcacttggggccttatagctgggacactgacgctcaaaataccaggagctgctggaatgggtattgtaatatgtatggtagatactgctcctcgtgaccttggctgcctttccttcatctgagctttctggtctagggacagcttcatctattcactgtttctttcctaagtatgagttttagagactggcgaggcgcttggggcaggagtatctactgactccatttcctccttctagttcaaaaggtgatgacctatcaacagccattctcaaacagaagaaccgtcccaatcggttaattgttgatgaagccatcaatgaggacaacagtgtggtgtccttgtcccaggtaagctgtggccacagactagtctttccttactgcacttacttgagggattttcccaggtttcttttctcatttttcttgcagtgactgcagatagagtggggtttactgggaatcccaatctccagggctgctgcttactccccgtcagcccaatgacccaaaggccttaactttctttcctcagcccaagatggatgaattgcagttgttccgaggtgacacagtgttgctgaaaggaaagaagagacgagaagctgtttgcatcgtcctttctgatgatacttgttctgatgagaagattcggatgaatagagttgttcggaataaccttcgtgtacgcctaggggatgtcatcaggtgtgtgtggggtttttggcttcacagggatgggaggccagagatagcctgcattacaggcaggacccatgtattacaggcaggaccaagttcttggcacctgtcgatgcaggaagcctcctggtcatgggaagacttatgcttcagggttgtctttaggttttggttctgcctccctgggacttcaaaatccatttctgcaggtcccttgagacaaattggcgttcctgtaactttcttgatggctttattttttcctactagaggtgtaatttatcatacttatatcctggcttaggataccactcgagggtgtgtatgtatatgccaaataatctcctcactactctcactagtatgtctaattgatggcttgtgttggggttggaatgaggtgggggtatgggcatggaaggtgagctgctagcaggtcttttaagcccctaagttaacccgggagagaggaatagttggagccagacctgggatagctctcaatgtgagtgattttgcttgttcttgcataattttaggcaagaggttaccccatcttggagtcatctctagccactcctacccaaccaaccatcacctggccaggatcatctcaggcttttgattcttttgaatggagtctaagtttcatgtagctttcttcttgggagtgcttagtcacttcctcaaggtgttctgaccacctggctgagataattttgtttttttcacttctgtttcactgaccctgacaattgttagcttaagaccttcccttgtaatattgggtcaccagtattagctagaaggggatcatccttggatatctccctgaagaccctgcatgtctttgtggggtttctaaatgtgtggctcttgattttggctcactgattaggagtgagtggggctgttccttcgccctcacttccaccctgttctccttcctctcttcgcctaaagccatcctgccttttctttttcacttactatcagctatctgtgccaggcccttttggacacccagtgcttgggcccgaagtgtggttggtaatatggagtctgcttgtcatcctcagcatccagccatgccctgatgtgaagtacggcaaacgtatccatgtgctgcccattgatgacacagtggaaggcattactggtaatctcttcgaggtataccttaagccgtacttcctggaagcgtatcgacccatccggaaaggtgagagctaattctgagcttaaggattattgactgtagggaataaaccttggaacatctttatctcattttctttttcttttttttttttttaaatcttttatgcttttcccctgtatttatttattcattttttaagagatggggtcagctgggcaccgtggctcacacctataatcccagcaatttgggaggctgaggcgggtggatcacttgaggccaggagtttgagaccagcctggccaacatggcgaaaccccatcgtgggcacctgtaatcccagctacctgggaggctgaggcatgagaattgcttgaacccaagaggtggaggttgcagtgagccaagattgggccacagtactgcagcctgggtgacagagcaagactctgtctcaaaaaaaaaaaaaagagacagggtctcactatgatgcccaggctggtctcaaactgctgggctcaagtgatccatctgccatggcctcccaaagtgctgggattacaggcatgagccatcaagcctagtctcattttcttttcttttttttttgagacagagtgtcgcgctgtcccccaggctggagcgcagtggtgcaatctcggctcactgcaacctccgcctcctgggttcaagcaattctcctgcctcagcctcccaagtagctgggattacaggcgtctgccaccacgcccggctaatttttgtgtttttagtagagacggggtttcaccatgttggtcaggctcgtctcgaactcttgacctcaggtgagccactgtgcccggccgctagactcattttcatatatttgtatacacacacatgcaaaccctgcacacatattcatatgtcttaccctctttttttcctccatccttcctttgctccatctctccccttctctgttccaggagagtaagctatctttatggatctctgaaggagaaagtggtccattttggctgggtcagggtccagagtgcacagttctaccattggtggttgtagtgaaaacttgggctacctatatggcagaagtcagaacttgatgggcttctgacatgtcaggttttgttcactgacctcttgtcagagggactcttcacagtttacctttctcatcttgcctgctgcttattaagacaggtggggtggagttggggagaggtagggcaatatctaatgaagggcactatctaatgagcttggcattttgaccccagggtctgatgagttctcactttgtcttgtagttgacacctctaactgtgcttgtactgtttgctctcgcaggagacatttttcttgtccgtggtgggatgcgtgctgtggagttcaaagtggtggaaacagatcctagcccttattgcattgttgctccagacacagtgat

SEQ ID NO: 97622 - DNA, 15096 bp, Homo sapiens
atcctgtattctcctctagataatcctttctttatccttaatttctctgccaagtttctttttttttttttttttttttttttttagatggagtctcgctctgtcgcccaggctggagtacagtggtgcaatctaggctcactgcaacatccgcctcctgattcaagtgattctcctgcctcagcctcccctgtagctgggattacaggcatgcaccaccacacccagctaatttttgtatttgtagtagagacagggtttcaccacgttggccaggctggtctcaaattcctgacctcaggtgatccgcctgcctctgcctcccaaagtattgggattacaggcgtgagccaccgtgcccggcctgccaagtttcttaaaaacagaggccatctttctggtctctactcttagctgcatggtatattgtaacacatcttttgccctatatttgtcagggtaagtaatcttaattgctgtaacaaacactcccaaaactcaatggcttagcactacagtcaattctgggggtaacagggagctctgttccaagcagtatttagggatccaggtgccatccatctagtagctatgccatgtcctagggtctcagaatactccactagagatcctctataactacagtaatagacatgggaagaaagaaaatgtaaagaacttcaagctgggcatagtactatgtgcctgtagtcccccagctcttgggaagccagggtgggagatcacttgagcccaagagtttgataccagtctgggagtgacatagcacaatcctgtctcttaaaaagagaaagagaaaaaaaaaaaaaagaatttcagaggagactttaggagccagccctagaaatgtcatacatcatttctatctatatttcattggccagaatgcaatcacatgatccagagtagactgtggaatgtaatctagctgtccaagagcaaaaggaaatggatttgtgaatgtatagcattgtctctgccacatgcccctactgagaagtctaatgatcatttcccatcatctcattgaatctcaccattatatttcactgtgttaacccttcattccatcactctttttttaatttttttagatggagtttcgctctcattgcccaaactggagtgcaatggcgtgctctcagctcaccataacctccgcctcccaggttcaagcgattctcctgcctcagcctcccgagtagctgggattacaggtatgcgccaccacgcctggctaattttgtatttttagaagagatggggtttctccatgttggtcaggctggatcttgaactggcaacctcaggtgattcccctacctcggcctcccaaagtgctgggattacaggtgtgagccaccgtgcctggcccattccatcactcttgagaaagaaaagaaactttttatctgagaaatgccagcctcttttaattatcaggcccagagaggcattaaaatgtgacagcatgggcctggcgcggtggctcacgcctgtaatcccagcaatttgggaggccaaggtgggcgaatcacgaggtcaggagttcgagaccagcctggccaacatggtgaaaccctgtctctactaaaaatacaaaaaattagttgggcatggtggcgggcgcctgtaatcccagctactcaggaggctgaggcaggagaattgcttgaacctgggaggcagaggttgcagtgagccaggatcatgccactgcactccagccccggcgacagtgcaagagactccgtctcaaaataataataataataataataataattttaaaaagaaaaaaaaaggccgggtgcagtggctcacacttgtaatcccagcacactgggaaaccaaggcgggcgggatcacttgaggtcaggagtttgagaccagcctggccattatggtgaaaccctgtcactactaaaaatacaaaaagctgagcatagtggcaggtgcctgtaattccagctacttgggtggcggaggcaggagaatcgcttcaacccgggaggcggaggttgcagtgagccgagattgcgccactgcactccagcctgggcgacagagtatgactcagtctcaaaaaaaaaaaaaaaaaaaagtgacagcatgtaacagcagtcatatctcaccttcccccacccccatggagccaaataattaccccttgaagccacttgctatgtgggctctaaattgataccacatagccataaaatgccatagtctagacaccataactcataccctatagttcaacaaggtatagccaatcactaatcaatgttgtttctgtaagccaatgagaattcctgttaaacaattttgtgtcagcccactccttgtcctcttttgcctttaaaaacttgcttgtggctgggcatgatggttcatacctgtaattccagcactttgggaggccaaggcaggatgatcccttgagcccaagaggtcaaggctgcaatgagctgtgatcgtgccactgaactccagcctaggtaacagagcaagatccggtctcaaaaaataaaaataggccgggcgcggtggctcacgcctataatcccagcactttgggaggccgaggcgggcaaatcacgaggtcagagttcaagaccagcctggccaacatggtgaaaccccatctctactaaaaatacaaaaaaattagctggatgtggtggcaggtgcctgtagtcccagctactcgggaggctgaggcaggagaatttcttgaactgggaggcagaggttgcagtgagccgagattgcgccactgcactccagcctgggcgacagtggagacaccatctcaaaaaaaataaaattaaattaagttaaaataaagtggccaggtgcagtggctcacacatgtaatcccacactttgggaggccgaggagtgtggatcacctgaggtcaggagttagagaccagcctggccaacatggcaaaaacctgtctccactaaaactacaaaaattagccaggcatggtggtgcacacctgtggtcccagctactcgggaggctgagggaggaggatagcttgaacctgggaggcgggagttgcagtgagccaagattgcactactgcattccagcctaggcaacagagtaagaatccatctccaagaaaataaaaaataaaaataaaaaccacatataaaaataaaaaatgcttgtatcaacattccccaaggcaacttggaaaagtgtcccgagcagtcgttctctaccttggcccaaataaactctctatattaattttgcctcagcttttttttttcctcactgttgtttttgtttgtgtgtttttcttttttgagacagagtctcactctgtcgcccaggctggagtgcaatggtgcagtctccactcactgcaacctccacctcccgggttcaaacgattctcctgcctcagccccccaagtagctgggccaagtgggtggcacgcgccaccgcgcccggctaatttttgtattttttagtagagatggggtttcaccatgttggtcaggctggtctcgaactcctgaccacgtgatccacctgcctcggcctcccaaagcgctgggattacaggcgtgagccaccccgcccagcctgttttgttttttttgagacggagttttgctgtttcacactgaggctgcagtgcaatggcgtgatctcggctcaccgcaacctctgcctcctgggttcaagtgattctcctgcctcagcctcctgagtagctgggattacaagcatgcgccaccacgcccagctaattttgtatttttagtagagacagggtttctccatgttggttaggctggtctcaaattcccaacctcaggtgatccacccgcctcggcctcccaaagtgctgggattacaggtgtgagccacagtgcccggcccctttttcttttcttttttttttagagacagggtctccctctgttgtccaggctggagtgcagtggcacgatcttggctcattgcaacatccaccttctgggttcaagcgattcttctgcttcagcctcccgagtagctgggactacaggcacctgccaccacgcccggctaattttttgtattttagtagagacgaggtttcaccatgttgcccagggtggtctcgaacttctgagctcaggaaatctgcctgcccaccttggcctcccaaagtgctgggactacaggtgtgtgccactgtgcctggcccttttttttttttttttttttttttttttgaggcagagtctccctctgttggctcaactgcaacctccacttcccaggctcaagcgatcctcccacttcggcctcctgagtagctgggactacaggtgtgcgcccccactcctgactaatttttgtactttttgcagagatggggtttcaccatgttgccaaggctggtctcgaatacctggactcaagtgttccgtctgcctcagcctcccaaagtgttgggattacagttatgagccacctcgcccggcctcagtttctttctttaaggtcaaaaatgtatgaggctacttttttccagttcctttatgttttatatatataaccatcacataaaattctcaccatgtgaggcactaactgctttataaatattaacccatctaatctcatcacaatgaagatatgtactatgaggtaggtacttatctccattccattttacaggtaagaaaactaagttacagagattttaagtaaactgcccaagatcagacaactagtaggtagcaggagccaggccttgaactcaggcagtccagctccagagtttatttcttaatcactgcacaatgctacctcttttctcttttgtttcttttcctttttgctttcttcttcctctgcctaccctttgctgttggtgctctccagggctctgtctttagccttatcttactctattctctctccctgtgagatttcatccattcttagaggttttctgtagactctccagtgagatctctaagctggggagtaggaccattgtttctagccatatccctaatggccaccacagaacttggcacatacaagtgccaacaaagtatctgaatgaatgacaactcccagctctatctccagactggagctgagcttcgagacctggacactcaactgcccactagacatgcaaaggatgttagccaaataaggggaaagtggggataggataaagggggaaagagtattccaggaagaagagatcaagccctgccaactccatttccagagttgttaagctcatttctttcttccatctccactgacacagaccttccctcttacctggcccacagtcatggtctccctgactcatcttgctcccctccactcgacagtcctgtgccactcggtggcaaaatctaatccccttcctcccttgctgataaccctcagctggtttacaaggcctcctctcacattttgtgccgcagaacagagaaggaattgtaggcccctgaagaccccaagctgtctctcctcggaggcctttgctctaggggctggtccctgtgggctggcatgccccttctgcgagctcttaaagacactgctcaggtgtcaccgcctctggaatgcccaccctggggctcccagcttgaactgcctcctctccgcttcagtcctggtaaaggcgggccttaacaatcgttgagtcccagaaggcttcacttccgggctcgtctgcttcaccagccagtgagctcgggcgagcccgtccattctgggtctcactatccccacacctatccgtatgtagagtggcgctagctaggtcagacctcgcctgaagaccctgacatctgccgctgggcgacttggccccgcccccttgcctcccttgcgcggcaccgccccactcctccgtgctccccccgaggaaatggttcaaccgaagggcggtgccaaggtgcccgggccgctccgattggtcagggcgagccgtaccacggcggtggcgggggagcgcttcgtgggcagccggcgggctccgaggccgtgagcgcaaagcctcaggccccggctccctcctgagctgcgccgtgccaggccgcccgccgggatgcmgtgggccgtgggccggcggtgggcgtgggccgcgctgctcctggctgtcgcagcggtgctgacccaggtcgtctggctctggctgggtacgcagagcttcgtcttccagcgcgaagagatagcgcagttggcgcggcagtacgctggtgagcgggcagagggcagggaggggagcggccggcctgggagcggagcctagggttccgaaggcgccatccccggacctaggaccggtgccagccctgactccgccgcccctctgcctccgccagggctggaccacgagctggccttctctcgtctgatcgtggagctgcggcggctgcacccaggccacgtgctgcccgacgaggagctgcagtgggtgttcgtgaatgcgggtggctggatgggcgccatgtgccttctgcacgcctcgctgtccgagtatgtgctgctcttcggcaccgccttgggctcccgcggccactcgggtcagtgctagcggcgggccagactgggaggctggggttgtaaaggggcccatgccctcctttctgatgtttggctgggccatgcaatggcgcgaataccctgatagtgtcatgtgcgattgtcactcagggcgctactgggctgagatctcggataccatcatctctggcaccttccaccagtggagagagggcaccaccaaaagtgaggtcttctacccaggtgggtaagaaggctctgtcagagaagtgggtcccttcacgcggggggtgcccacaattgcggggagcatggcatggaaaaggagtgtgttgggggggccctcctcatggttcccttcctccaccctcccataagccacaggtgattggttggggcagagctgagggactcttgctttcctctgtcaaggggaaacaaaacataacaacttcctattaaacatgtctgatttttatctgcccaggcacaattttgcccagacagtattccaacaactgttggggagacaatgggtaatcagaaatgctctcaataccccaaaagacaagacagacagttatctttttatttgtttgttttttgagatggagtcttgctcagtcgcccaggctggcgtgcggtggcgcgatctcggctcactgcaagctccgcttcccgggttcacgccattctcctgcctcagcctcccgagtagctgggactacaggcgcccgccaccacgcccggctaattttttttgtatttttagtagagacggggtttcaccataccagccaggatggtctcgatctcctgacctcgtgatccacccgcctcggcctcccaaagttctgggattacaggtgtgagccaccgcgcccggccgctcccctgccttttttttttttttttttttttaatagtgaaacaatttacttaagaaatagagcactggacttcccagtatatttgaggttgggtgtatgcatcgcaggcatggtggttgaacagctacacttttcagataaagcctcacaagtcctggaactacccctttcctagctacaagcccagcccaggtttagctaaatttctgcttgattcgagtgaggcttgggagtgcagacttccatacagtgggtccatggccaagcgaggtagccgtccatggcttctccaaagagaggacgtgggtcagatgatgccacagaacatttaggagtggccatctgggccagcccagtgaggtagggctttttgtttttctgaagctccctctccattccccacccctagttagtccatgggccagggaagcagcagccatggaagggcagggcagagctggcttttcacttgggtgctccctgtcccccaggggagacggtagtacacgggcctggtgaggcaacagctgtggagtgggggccaaacacatggatggtggagtacggccggggcgtcatcccatccaccctggccttygcgctggccgacactgtcttcagcacccaggacttcctcaccctcttctatactcttcgctcctatgctyggggcctccggcttgagctcaccacctacctctttggccaggacccttgaccagccaggcctgaaggaagacctgcrgatrgacaggagcrggcaggcccgcacatatccacttgctggagcccatgtttacagacagggacatacaccatgcagatcctgagttcctgctgtatgagcagggatatccatgcttatgtatccaaacacagagacccatgggaacaaatgagacacatatagatactgagacctgtgtgtacagtaggaccatgcactcacacccatctggagagggagcccccggtataccaagggagccagttgtgttcagacacacacatcacagcttgactcactaactgaggcctttccatagctccacagcttcccacctcctccccaccaaaccggggttctagagttaaggatgggggagggtattatactgcctcagtctgactcctcaacccagcagcaatttgaggggatgagggggaagaggagctgccttttggaggcccccttcacctgcagctatgatgcccttccccttctcccctgtcctcaccatatgccttatccccattctactcccctgctatgcaagtgcccctgtggcttgtccccaaccccctcagcaacaaagctcagctggggaacgagagtaatttgaagaatgcttgaagtcagcgtcttccattccagaaagacccccattcttcctttgggggtatgatgtggaagctggtttcagcccaggacccaccactgaggagaggatctagacaggtgggcctaattccaaggggcccttcctggcctggagaaggccttttacacacacacaacacatacmcacacacacacacacacacatatcacagttttcacacagcccctgctgcattctctgtccatctgtctgtttctattaataaagatttgttgatctgttccatctttttgtgtgtctgagcagccggaaaaagcctctgacccctggggacctcaggaagatctctctcttgctgtgtgattcatggtagattttttttttttttttttaagagatggggtctcctctgttgcccaggctggagtgcagtggcacagtgacatgatcatagctccctgcagccttgaactcatggtcccaaacaattttcctgccttagccttatgagtagctgggaccttatgagtagcaaatgccaccatgcctggttagctttttaaattttttttagaaatggggtcttgctatgttgccccggctgatctccagctcctggcctcaagtgatccttcctcagtctccagagtagctgagataacagaaacaagccaccatgcctgacaagacagtggcttttgactagtagggactatatacttgagtgtgccttagaatcacctaagacactctttgagtcagtaactcagactactgagctccattgccagagatcaacatgttcaataagatttcttccaacacagctgcgaatgccacaatttgagaaattcagggcagggtgacctggagtgtgtcttggtcttacctctgccggtgcaatcctgggaacagtcctaagaatcttcccctggctgaccacagggtggcagtgtgcacccactttttagctgaaaggcatagttctcagttggctttttttctgggctcccagagtagtgtctgcccccacccaaaacaggagatcctccagtctatggtctgccttctccaggacccaccactaatgtggaggctcccacaatgaaaggaaggcacactacctggcagtatgtgaggtaggtagggcctggactcaggtaaggcaagagaggtgcctaaagtgcattcattcccaaagaccctgctcttgccttaacttctgcattttacacaccaagcatgcctcaccctcgtcctggccctgttctgagggtaaggcatagatcactcctgcttctcaggattcctggtattttaaaaatggaagaaacatggttataaaaattagatattttaacattctaaagaacacaaatccgaaagactatatgtataactgcatttagaaacaacatcaaaagtcaatttgtgactgaatgtggagtccaggtaagttggccaacctgaaaccgactcttcacccccaataccaccgtgtcaggcatagtaggccctggctggctcctctccactcaccccaggttgcaaatccatgcctcctgggggattcctactctgtaacccagctctgcctctaggctcagagcccacatgtcagggatgacccagcttgccctgtcattcctcccaaacgtccacaaaggactaggctcccaggcccctcctaatctctgctgctaaatccgttggtcgtttcatagttcttagctttcatttgacacagggtaatcactctgaaggcactcttagtttctgggacactactcctccttaattgcctcctttactggaatttttttttttttttttttagtagagacaagagtttcaccacgttggccaggctggcctcaaactcctgacctcaagtaatccgcccatgttggccttacaaagtgctgggattacaggtgtgagccactgcacccagctactggattcctatctcctcattctctgactttcttgggcttagtcctcaaacctcttctgtttacaccccttcccaggtgattctgtgactttaccatctatatatcttgacttctaaatttttgtctcagcctaaatctctgccctgagcaccagagttggaaatcttactgccttcatctctactcaacatctccacttggctgtctaataggtatctcagacttgagatatccaaagcaaaccgaattctctcccagccccacaccaccaccatcctgtagtctttactgtgaattaagggcacctccatttacccagctgcccagagtcattttggacacatctgtttctctcatgtcccacatccaatccatcatcaaatactgtttttatctgcagaatatatccagactctaatcatgccttctcacctccactgcccccaccctggtctaagacaccatcatctcttgcctatagactattgcaatggccccctaactgatcttcacgcatgcatcttgtgtggagggttctccacgcagcagccagtcagactttcactctctgctgagacctaaccagtggctttccatctcattctgtcctttcactccttacaagggcctactccaaggcccatgtttcctctgatcagacattccaaccactcaccccttcagcccccctattccaacccagtggcctccttgcttttcttccaacacatcaagcaaaattctatcccaggatatttgtacctgctattctgaccgtagtgctcgtccctaggtatccacgtagtcatagctctcttcctcccctccttcaattcctgctcactgagttcttcaacacttatataatagtatctcttgcatggtgatttgaaataccttcacaaaatttttgatgctctgtccttcaagaggtgaagcctaaattccttccccttgagtggactagacttaattatgtactttcacaaataatgtggcataaataacagtgtgtgacttctaggactaggccataaaaagcattgctgtctaaagagtctctcttggatcattctgggggaaaccaactgccatgttgagaggacatacaagcaatcctatggagaggcccatattgcggggggaacaggccccctgccaagggccatgcaagtgagccattttggaagtagatcctccagttccagtcaagccttcagatgactgcatccctggccaacctttttactacaacaccttagaggacaatgagtcagaaccatccagacccacagaattgtgagaaaataaatgtttttgttttaagctgctaaattatggggtgatttgttacacagcaataggtaactaatgcccccttttatgttccccccaacccagctacatttttctccatggtacttaccactatctgacacactgtatatttcccccacttagaattgtaccattataataaggactttgtcttatttgctcctgtgtccaacagtgcctggcaaaaaaaatagataataaatatgtgttggatgaatgaagcatgggtctctgaaggtctaggtctgtctccgtctctgtgaggtataagaccagactgcgggtatgagaggcagcctttccttttcacagatgaagagagataaaccaagtcccagtcaagcatattccttcccctcagcccttcccagttgtagccctcctggcccagaccccaaaagtggattaactttgcttgattgatttgggagctgggggagtgactgcccagccccttaccattcaacccaaaccctacaaagcgatctccaaacactcagaactggaatttccccaagccaattcctacctttctaggaagactctggccacctacctttgtccatggacctcctctgagcagccaggggaagctgtggtggggaaaagggagcaagcagggcacaagggttctgtggattgctaccctctgctctccagtcttccagtagacttccagggcatgtctgtctgcctggcacattcactgattctcccctcccagcatcagggagggttgggcagaggaggaggcttggctctgccccaggatactcacaccaaacaaagccatgggggaggaggcatcagtaccgacagtgattggatcactggagcttctggaggctggggggttctgatgggctcagaggtctgaaatctgaggtggaggactctggggcagccaaaggaatgaatggggtgagcctcagcgtggccaggaatgggccatagagaaccaggacttagtgctgcagtagaagctgggcacagaagggtgcagagaagggtggcggctggaggcagggagagcagggaggaggcacccaccatggtcagacccaccatggtcagaagagccggtggtttgagccagagcaagctgaggctgagaggagtggactgattgggagaggacaagggaggagggaggagacaaaggtcgtgtttggattcctgccttctgggggtgtgaggtcagaagacagtctctggtgccacagtttcatacctatgccaagtgtcacccctacagacacctgctgttcacttacacacttggcatcacctcacagtgtccctctgtttggtaagtggtccccttgggcacaggaagaaataggaagtatgaggattcccgggaggagtggggtccaggctgttcagagcagaaattctgagaggcctgccactcagaacccccaaataaggaacagcatttcagcgtcttgggaatagttagggggagggcgcaaagcagtgggctgagggggtctggagatacagatgtggcagtcaggcacacataggtggagaatgtgtgtgaacatgggcgaagtgccggtcactgttgaaacaaacctatgatgagtaccagaggttcattatactattcacttgtctatgtttcaaaattttcataatacaggctgggtacggtagctcatgcctgtaatcccagcactgtgggtggccagggtgggtggatcacttgaggtcaggagttcgagaccagcctagccaaaatggtgaaaccccatctctactaaaaagacaaaaattagccgggtctggtggtggacgcctgtaatcccagctaattccagctattcgggaggctgaggcagtagaatcacttgaacctgggaggcggaggctgcagtgagcccagatcgcgccactgcactccagcctgggtgacagagactctgtctccaaaaaagaaaaaaaagaaaagaaagaaaaagaaaagaaaagaaaatttccataatagaatgtcaaaagagacaaaaactgtgtgtggctgtgtatctgcatgcggtgagtgtgcagtcagcttaaagacctctgagagtgtgtgagtgcataggtgtgggtccaccaccatgtgcactcatgtgtgcaaaccgcagcatgcccgcagtgggggacagcacgtaggcagggcaggggtgctcaaggcaaagggagaagcttctattctgaccagaccctccacgcacaccccagcatcttgcagagggattcccctcttgatcacagcgtgcccaggccattggcactgtggtgaccatgtcacggaacgtgtgagactgggaagctatgcgcctgaacttgtgacaaggtgtgttggtgtgtggatgcggctatttgtatgtggaagcccagtgccgagtgtgggtgtcgggggcacgacttgtgaggctgggcggggctctggtccggagtccggtggcggtagagccctcattttcgcacgattcccccgcagctttccagcgccccctgcccccgaagctggctggaaagaaggtgggagacacctgttggggagctgagagcggcagatcccacaggggcctctccccatgcgccccgcccgccctgccccgctcgggtcccgcccccgcggccgccgcaagcagcgcggcgagtgagcgcacagccgccagaggagcacagggcggcgggagcgcaccgccgggacccagccgaggccagggccgcctgggaggcgggcggagcaaaggcagcgccgtggagacgccaggggcagcgggccacgccaggcaggtgagtgcggccgcggggcgcccggagcgagggagccgggcgtcgcgactctgccgcctcctgcccgtccggtcccgtgcccgtcccaggctctgccccaccgccctccatccccgcgactccttggtccctgtcctctgcccctctctccggctgtttttcccgtccctgtctctgtcggtccctctctatttaa

SEQ ID NO: 97623 - DNA, 12761 bp, Homo sapiens
acaagaggcaggtttgcctgacacaattcccagcttgactttccccttggttgaatgatttgggggttctgagatttattctcctttcacaatatcaacatccaggtcctgagactgatatgcacctgagactgtacatatgccaaatgggtgtgcccttgtgatgactttacgtcctgtgtgacatgggtatacctgtgcattgtgtgtattcctttgcagtctatgtgtgtgcctgtgtggtgtgggtatgcctatgccctttgtgtgcacctgtgtgatgtagatgtgcctgtaccccagctgttcctgtatgtatcagtgcctggatgggtcctggagcctctggctgctcttctctttataggctctgtctctctagcctggacttcccagaggaagaagagaacagtgcatgtgggtggagtagagagcaacactaaagctctggacacagatatcccaagttccagtcagggctatggccttcccatgttaagccctaaagctaatactcactccctagctctgggagataccaacaactctggggactctgcctcttagcaaatcaacacctaattcctgggaacatttttggtgccttctgctacctcctcttcagggatggctgcagggcactttgtcctatgagtcggggtggagaatgtccagtctcctcccctcccaatcacttcctccatcatccaggtctccattcaccatgttacttccttcacttctccttgcccaatccctcccacaaggaagcccctaaaacaggttcccagatctggtccccagcatctgcccctcacaccagggcctttcaggaagatgagttctatggctccattctctctgactccagattcaccacactgaaaggcagcctctagaccagccctggatggattgcacaaactggagactgcggaagacctctgccaaggaaagcctggccctccccagtcctgtctgccccctctgagccctgtctaagattacagcccatggcccttcctctccttcctttcccagagcaagagccacagcagttagcccatgacagtgccagagacagccctggcctggggaaccaaggaccagaagggaagaccaggcctctagttcctcggcaccagacctgacccagccaggcctggagtgtcaacatgagtgtgaatgtgagtgaaagggtgaacgtggtgaaagcatagcttctgaactcccagactgcagtgcttccaataaaaccacctagcacccatggatctctctgtctgctctctctatgtggctcagacaagggaagacaagaatgagagggagaaagagggtgggatgagggagagaagaggggtatccattcctcacatttcaaccagaggaaactttcaccccacttatttctggtcactccctcctatacagtcagcccagccccaaaactgtctttccccttactcaaaccgactacagctcagtactgggccttgactgggatgtcagagctctggggcagctatttccaacctcccacactgggttgattgccctttcttgacaccttctacttcttccagccagcctgctccatttatagtaagaatctcactattctcttttgatcctcccagctctacccctacctctcagagggcagacaaggtgcctgtcttgtttgttggttgttttgttttgttttgtttgagacggagtctcactctgtcacccaggctggagtgcagtggtgcgatctcagctcacagcaacctccgcctcccagtttcaagcaattctctgcctcagcctcccgagtagctgggattacaggcgcctgccaccacgcccggctaacttttgtatttttagtagagacggggtttcaccatcttggccaggctggtcttgaactcctgaactcgtgatccacccacctcggcctcccaaagtgctgggattaaaggcgtgagccaccgtgcccggccacctgtcttctttactactacatccccatgcccagcacagtgcctgacacacaggtggtcattcagcaaatatttgttgattgaatgaatgtagcaaaaaaaaaaaaaaaaaatcacaagaagataggtctcagaccagagaggaagggcaatgaccctccggccattcagtgacttagccgaggccactcaactaggtatttccgtagcctggccttttctagactggactctatctgaggacctattcctcctcggcccagggtcatacaaggggaggaaggcaggcaagagaggcactcggcagggcagaagcccagggaggggtagaggagacgtggggattaagaaaacagtactggacttagtcccaactctcttttcttgctgcctgctgcggaagcctcggccccccaaggtgtagctccaaaacctgacctgacacctataaaagagggtcctttgcccgcatcttaatcaaccgaccccgcccctggcctcaccccgtaagatgacgtttcgactccgcctcctctgggagacatgaacaccccaccccttccgggggacaggcaaacctagtgcgcaacggcatccctgtgacgtaatagtaacggtccgtttccggggtggagccagggagggcgggagtttaggctgcgctgacccctctcagccccccctccaggtgaccccagcccctgaaaatcctcacccagggccccaaatctcccagccccatgaccgccaaacctctcgccctggccccctaaatgccccaggccccggagatgaccggcctcctcaccccttaacttccagtgcctcccaaatctccaagcccaccctgtcccgtggtggcaactgaggcttctcgggggcatcagcctcagattacctgagaactgggcagcctcgtcctgagaatgacggagaaggggacctggggctagggaatccctgattcaatcatgccgctccccaggagacgttcggagcccaggacatgtcgggaatgaggagatacgaggtggcgctggaggcggaggaggagtgagtggaggcgggttctgcggaggaggaaccaggcggctccggggtgggggagggtggagttctgcgggggcgaggggtgggcagggcgagcctcccaggggcgtgggcgcgaagggagccgcttttagaggcggggcggagccttcctcgacggcgaggcaccgcggggcggagtctgtagggtcagctcctccccgccccgccccgccccgcccggctctgccctctctctgcaggatctactggggctgtttctactttttcccctggcttcgcatgtggcggagggagcggaggtgaggaggctgcgataccgcggacccgccccgggcatggacgggactcagtctctgaggacccatcggggggaatccggtagctcccgccccgcctcatgccagtgtcgggtcgccccacagctcggcgcaccccggggagcagaagctggagcctctgcgaggcctgatgagctgtctgtccagcggcctgggtcctactccccagcgctcgggtcgtggcttcccccgccgcagccccaccgccgctgcccagccagccagtgcattaaagatttaaaccgaagcccaccgtactgacctcctgactctgccgccgctgtcgccattcgagccgagcgcccctccccacacgggctctgttccgtactgacagggcgtccctccctggaagggtgcccttccacgtcaaagcccctcatcagtgtcaggcctcctgttactatcaatggctgtctcccccaatcccaacccccaaaaacccatactgtgagtcgcctatatgaagagaactaaataatcctgcctgttactcccttcctcggagcgaggactttgccagctgtctgaagaatcttctctgctgggagtatatctaaaacattttaagcagaggtgtaggatgcaggctgtaaatgataagagggggagattcctagaagctgcctgccacagaggagcgacttgggttggcgacctttcctacagttcataccccaacttttggctcctccagtctgatcccaagtttagagatccttggcatcagcctacctagaagttcttgctccctccctaggagagtccaagggccactgctctctgccgcccccttctgtcacccaatcagcctgggacccactaactcctcaagtggtgagaatcagggactgctatgtgggcctgccttcagttagggactggacccagcaccagaaagggcaccacaagattaagttaaagaaagagatggcccagtttctggctggggccaaagctacagcagattgtggctggggagaagacttggtcttaaaggggagagatgggtgcacacccaaaagcatttgttttctgccttccgaagacttctggaccgacaagcccagggaagaccagaaagtatgtagcgcacagccaagtgatgaagaaggtctatgacaagcccgaggaacctgggagatttccttgggatttcctcagtggctacacccaacaagccttgggacacaagagaaaggcctaagccctatcccaagagaaagcctactccatagagagtggctgaccctacagcagacgactgcaacaagataagggctggattactgtgttatgacttggtttatgtttcaaatatagagcaggacttgcagattgagatccctggaccaggagtgggaaattcttaaaggagccaggggcactgaacttggcagcatacccccaccctaggcagctcccagcttcctggaaaggactggataaagatgaataggagctttgcattgcggggagggggtaaagaacggagtgacagctgggtatgggattaggagagaagcggctatagctggagggtgggatgcagggggtatagcagttggacatgagggtgtgactgaacccgggtagggagaggggatgttcctccaggcccaggaaggaggctggaatttgagtaaaacaaagatgtaattgagtgcttgagtccaatgtcttcaacaagtcagggactggatctggagaccctaggcccctgctggcaagaggttggcattcctggaacaggactagacaaaaacaggaaggtaagattcactgggccttttacctgttttgacaacagtaacctagcaccaaagagcttttatcttccctccttatctaccccacctttcctccctgtctcatcatcctggggaaagctgccccacctcagcatctccaaaacacccttaatattaccataaagggccttcccccagcttctctgaatggggctggcctcagccaagaaccctcctcagccagaagggcctgctctagggacccattcccatccatttcttctgataagacaggcaggccaagccaggaagtggggaggagaaggtgaaggcaagttggtgcttgcctgccctctgctcccaccccacccacaactcccctgtcagaatctgtgtgtgctagtgtgaatttgcttgtgattggatgactgtgaaaacacaattgggtgggagagggactttgagtataaccggggctatataattttgtctacggttgtctgatcatgagtatgactttgtgaggttgaccaagtgattgaggagtgactttgaatgtgtggctatgcgtatttgagtgtgaatgtctatcattagatgctgctgtggatgcttgactgcccttactcactgttccatcagtccctacatcacacactaatccttcccccagcttcactgcccagagcttaggagcacatgggaaatggctatcctagatgaggaaggagtctgtggcaacaggccgagaattagggcccaggagtgtcacaggttacacagtacatctccaactgcctctgactcacctagtgccccaggtaaaaggcacccagataaaaggtaggggaggaggagagagagagaaggaagagtctaggctgagcaacatgaaggggcccccaaccttctgcagcctcctgctgctgtcattgctcctgagcccagaccctacagcaggtgagtacttgggggtatagaaagctgggggtctgggtgaatgggatgaagttgaaaagacccaggaaatccaacctaacctccagctgtctggcagagaggttcttggtyaggatccctctgaacacayggccctgttgcccctagcattcctactgccacccagcactgcctgctgtactcagctctaccgaaagccactctcagacaagctactgaggaaggtcatccaggtggaactgcaggaggctgacggggactgtcacctccaggctttcgtgtgagctcccacccctgatacccctgactctgacctcagtcccaacccctaatgctgatcccaaccccagccctaactgctaattctgttgccaactcaggttttcatctggtccttgctcctaacccctaattagggtcattggggatgaccctaatctcatccccaagctatggtcatagctttggacctttctctacccaggcttcacctggctcaacgcagcatctgcrtccacccccagaaccccagcctgtcacagtggtttgagcaccaagagagaaagytccatgggactctrcccaagctgaattttgggatgctaaggaaaatgggctgaagcccccaatagccaaataataaagcagcattggataataatttctgagtataatctccaagaacttccttattctctttattcacacctgcacaacccctgcaaggggaaaggccaagagccaaggacccacacacactccccaggcacctacatacatgcatgcagagaatacatgttccctgcctcacagacacatggtcacacatggacacagatgtacacattacacacgttccttgagcagaactccaactctggggtgaaatcagaggtacaagcacctttcagctgcaaatttgaaatacagggtctcacagaaatgggctccaaacagaacttccagctgagatccaaccatagggatctactgtcctgcctggtttctatccacaccagcaagacagaattataggtggaatctgccgaagccctcctgggtcctctacaggtttggagctcctagaagaagcaggaggcaaatcaggagagacagtaagaccggatcttggcccagacaccctgagaatgagggaggtgactcagttctaagcttaacactctgaagatgagtagaggagcccagctctgagggagcctcttcaacacactgaagatacgggagtggacctagctctgggcccaggcacattaagaatgaaggaggggacctagcactgatccaagacaccttgaaaaaaaaggatgaatatccagctctgagtctaataccctggaagagtattagtactaatactaataccctgaagggaagtccacctggggtccttcctcagtaccctgagaggagggaaagagacccacttctgagcccagggactcaagaatgaaaggcccagccctcagcctagacatcattaaaatgaggagacccaacttggattcccagcatgttttaaaatgactagggcagccagctcttaatctggacactcaaaataggggcaaacatctccaagtccaaatcttctggatgtcctactcacctggacgcctgtccactggaatcactgaggccaagaacccaggctttggggatccatccttcccaccccgtctcagcctcagcctggggcatagaaaggcagctgtctctccaacaatgtgggttatctcagtctccgccaaagggtttattagtaaagggtcaggagaggaatcagttaaaatcaagtggggcatgggggatggaggtatggggaggtagttccagaatcagacaggttcagcgggcagtcatgaagggtggagatgaatgtggtctatgggcatcagagcatgtgtgaggatcagaggctgagggaccaatggcagtcacttaccagagccccagtgccagggccccagccaccagtcccaggaaagaaaggattcccaaagacgccagcacagctacctgctccacagagtccctgtgatctgagggggagggccacatgtcactgagagcaagcctgaccaagctcggtgtccccttttctctggggttttcagtcctttacaagtcttgcccatctgcccaagctcaccaagtagccgagggtgtggttggagggagggccttggaggagcagggctgtccacctgaggctccacctctggctgcgtgtgtagctggccccatgctggtatctcctttggtatggtccctaaaggaaggcaagacccaataagtgtccatacgctggtggggacgggggtcacgtcctgtgctcaaggccaaggcctaggttggaagtcaaggtacctaggaggaggagcctgatagggcatggccagctcctagggagcatggcaagctccaagcttgtagaagtggagcctgtaactgcaggggtggaggccaaggggcaggacttaagctaagacagggctgtaggcaaacaagtctgaagtctgggacagcaattgccgtgcctgtgtgggcagggcatgtgccacctgcctgtcttttggaactggttcagctgatagatgctttgggatggggcctctgcccttttctttggctttgtctctcaccagtgctcggagttccccaggcctccgggctccaggtgctccaggtgccagcatctagaaagtcccgggcactgactcgtacagcatggggcagcccagccacagcatctgtgatcacctcctccagtccagctggctccacctgggggtaaacatgactcactgttacccagcttgtaagtgcagggccttcccagccaccatctacaaagagcaccccttgctcccagtctcatcctaaagcctagtggagctgtctaggtctcatgttgggtgtctggtggagctgagtctacacctagtgtttgtaagacggcagtagtgattacttagagaggctgtggcatcaggcagcctgggttcaaatctttggtgaaccacatattgaatgaccctttgggcctctctgtgactcagtttcttcatttgtaaaatagaggtgaatctacctaaacaaaacaatgtatgcaaaaagtgtagccaggtaccccacaggcaggcagcactaagtaaatattagttattatctgatgctgctgctccctagtcctgataccagccaatctttaacatctcctgagacacaaattcactgctatcctcagctgggtatatgagtgtttgtaggagaatgtgcctctaggtgaaaggcactccttttcctaagagttatttttaggccgggcgccgtggctcacacctgtaatcccagcactttgggaggccgaggtgggcagatcgtgaggtcatgagttcgagaccagcctgggcaatatggtgaaaccccatctctactaaaaatacaaaaattagccaggcatggcggcgggcacctgtagtcccagctactcgggaggctgagacagaagaattgcttgaacccaggaggtggaggttgcagttagccgagattgcaccactgcactccagcctaggtgacagagcgagactccctctcaaaaaaaaaaagttatttttttaaaagccattgctatcttcccacagatgtgctttacctcatagttatagccccacaggacagacattcagtctctcagtcaccactgcaacccagcacccagtacaaagcctggcccacagggaagtgttgggtcttcagtgacctgccagcactggaaagctatacagaacacccaggatcgtgaaatcagagacaggacccacagccgtgggttgggacgcactccaggcctcaccgtggaccaggctggatgctgcgccggacggtactgcaaacggaacttgagcaggaagtggggctggcacggccaggaggcagggtatgtccagctggctcgcaggcgtcgggggtaacctggtactgactctacccgcaggccctggggtgggtcagggcgcactaagggcatcaagacacaaagtcagggtaggctatgggtctccatcacttccccaccacttcccaaagtgtgtgtttaaaggagccttagccagacactcctgagaggggaggggaaatcttaaacttgatcatccattagactcagaccggtcatctgtattatgaaatgggctgaggccgcgtgtggtggctcatgcctgtaatctcagcactctggaagactgaggcgggaggatcacttgatgccacgagtttgagaccagcgtgggcaacgtagcaaaaccctgtctctacaaaaaattttaaaaattaaccagacatggtggcacatgcctgtaatcccagctacttgggaggctgaggtgaggggatagcttgagcccaggagttgcaggcttcagtgagccaagatcacaccactgaacttcatccagcctgggcacaaagtgagaccctatctcaacaaaaaaaggaagagaaagaaaaaaagaaaccacctgagatctgcgggtggacttttgaagtgcttcttgagtgaataaaagagcaattcctattttcatccaaggaagatgaattggcccaaattccagctagagttttagtgtcccactcccatgcacaggtcaaggaaggaggggccagcaagggaggacatgacatatggctgcattcggtacagggcctgctctgaggctaggcagccaatcaggcagtgtgggtagcagcagcagcctctagagtgtgtgctgaaataaccatgcctcctgggctctgatccctttgccttctcaggctccacagggccttctctgtgtgaaatggagtctaggttgggaggaaactgggagctctgggagtggagagatctgagtccatttggggtctctgtgatgggggtctgggggaggtctggggtgggtactcacagatgctctgcaagctcacatccagcaggcgtgtgctggcacccagtgggttcacctcagtcacattaatccggtactggctccagaactcagccccgtggacaacacagcgggcagcccctaggggatcctgtgggcatggccagggccctgtggatggactcctcctagaagggaggatgtggtctttggctttgaaaatgcctactgtgggacccagctggagcccccacatgctccctcacgtcctacctctggctatcagctcctaggactgtcttcttcctggtggggagggggccatctgaagtcaggaaggaaaagagggccttctgccctctctgaggctttcctcagaacctacctccctgcctcccacacccacattgcaccagcatacccaaatgtgtaggcatccacacccaatcacacacacacctgtaggaggtgaggtagcgggtgggtaaaccgctgatctggctgggactccaagtgcaagagaagttctcatagtcggctgcttggcaggagacaacagggcgggctggagggtctagaggcagagggtacacctggagactgagcagtcctcaggtcctcctggtcccagagggcttacttaggtcccatactccctcaggatccctatgtgtcatcagtgccaccctccccaactcacagcccagctgcagggtcactgtgcccccaagtgcaccatccagggtctggcagatgtaggtgccctcatcagtgctgtctgcctgggccaggaccagttcatgccctagcccagagtcaggtccctggagcagctttggctccccatcccgaaaccaggacactgggtccctggaagtgagatgaggtgacaatggacaaagacaagatgtcaagcataagtcagaccatgccacagctctccattggcttctaactgcatttgcaatagaacccaaattccttttactggctttcaaagccccttgtgagccagcccttgccttcctttccttcttcagctcctatctctctccccctcacccactgaaaactccagctacattggtcttctttctattcctcgggggtattgagctcattcccacctcaggacattttgcactagctgctccctctgtcacgagcgcttataccttaatgtgtgcatggctgcctccttcctgaccttcagaaatcagcttcaacaccatctcctcagagagacctttcctaactaccaattaaaaggtaaccacgggccaggcacggtggctcacgcctgtaatctagcactttgggaggctgaggtgggtggattacttgaagtcaggagttcaaagcctgaccaacatggtaaaaccccgtctctactaaaaatacaaaaaaaaattagccgggcctggtggcgcatacctgtaatcccagctacttgggaggctgaggcaggagaattgcttgaacccaggaggcagaggttgcagtgagcccagattgcaccactgcactccagcctgggcaacagagtgagactctcggaaaaaaaaaaaaaaaaagtaaccactcagttgtcctcttcgacatccctcactttggtttttctgccctgcaggtattactatctggcaagattctcctttgcttattgtcttccccactaagatgtaagctctttgaaggcaggcaccttgcctg

SEQ ID NO: 97624 - DNA, 47738 bp, Homo sapiens
tgtacaacatggtagtactggccagatgcagtggctcccacttgtaatcctggactttgggaggcttgtttgaggcttgtttgaggcttgtttgaggcctggagtttgagattagcctggcaacatagcaagatcctgtctctacaaaaaaatattttaaaaaattagccagacatggtggcacatgcctgtggcctcgctatgctggaggctgaggtgggaggatcacttgagcccatgagttcaaggcttcagtgagctatcattgtaccactgcactcctgcctggatgatagagcaagactctgtctctaaaaaaataacaagtacaaatgaaagtatagtttcctttacaattcactgctcctggccccaaagtttgttcatagtctaaaacagtagttccaaaacctcgctgatcatcagaatcacctgagagtgattccgatcactcactcacacagtcttgggtttcatctcagtcctactgcatctgatctcagggttactacctgggaatctgtttaaagcttcccagaaaaggatagtctcatgtagtgtttataggactataaattggtacagccttttagagggcaatttggaagctgtatttctagaattatttgtacaagcaaaaagatttatacagagtgttcagtgtagtagttgtaatgtcatagcctaagtgtccagcaataggagaaaggttaagtattgacagttacaccgtggaacattatacatggcaatagaagtttcaaaaggatggctggaggggcagtgtctggattgaaggcatttgggctggttcactgcatttaatgtgaatttgttaccaatatttaaaaatctggagattgcacatttcaaaaattcagatttcttgcttttcttgaaaactcaaatttggcaactctgggccaacatttccaaatggcagtagttagtttgtggttgggtaacatctgatgccattggatggaacatctccagttttctgcagttcctactggatccatttaactcatttatgttatctgcctaacccctgtaggcatttgagttgtgatcctggtgttaaaagaatgggacagatttgcaaggaagtccatttgatactctgttagttaaaaacaagctggggaaaaaaaacacaacaagctgcagagcaatatgcataatacggactcatttccataaaacaacactggctgggcgcaatggctcacgcctataatcccagcactttgggaggctgaggagggcagatcacttgaggtcaggagtttgagaccagcctggtcaaaatggcgaaactaaaatactataataaaatttttagttccactaaaaatacaaaaattagccaggtgtggttgtgggtacctgtagtcccagctactcgggaggctgaacttgggaagtagaggttgcagtgagcagtgccattgggccactgcactttagcctgggcaacagtgggtgagactctgtctcacaaaaacaaaacaaaattatatgtacacgcatagggaaacagtatagaagtataataccaagcacagcaagcagagggacatcctctaattttgttgacatgtttatgcttacatattgtttccggtttttaacctaaaaagtctcccaggtgatccagattttctgccatgtttaggaactagtggtccaaagcagggcctcttgtgcagtgtctgtgtgggtggagggagcactaagaatctgcatgtttaacaaataccctgtgggctttgaacaggtgatttgaaaccacattttggttaacactgggcagaggtaggttctgagggaaaggtctctattctttgatatctctttgagagcgatctttgccttaggtcttccagagaggggaaaaaagtaagacctcagaaagtcggcattttacactgacctaaaagctgtatgactcagaagagcctgactcactcaggctcagtctttctattatttcttaaagcatctaagaccccacgctttctcagtgaagtggcttgtagctaccaattacgagcaattgtctcctccaaaggcaccaattctaacagcaattcacttgggtacaattgtgtggtttggagtaagagcagcagtgaggcaaggaacttaaatctgttcctggctccaaaaatgctttatgatacttgtcctttgtccatcttagtctctgtgtctaaaattagcaccaacatccttcccaggcatgactgagttggatgaaggttataagggtagaagctctctttctggtcagctcttacagtgcctagaacagaactgcaggaatgcatactttttagaatctttatgaccccaattaagtaaaccctattaaggctcatcttcctatttcccctctctccgtttccctatttgaggaggggtaagtatcagaaagagagaacctgaactgaacaggaggaaacagaagttccacatcaactcactacctgtcagccttggtatcaggggtgcccacctcccacccctgccttgctggcggaaccgagaaactcggaaaaaaacaaacaaaaaaacaactgttgtagcttggagagaattaatagaactaggattccatggatgtgaaagtcttcctcaatatgctaaataaaccaagttagataacagtgcagtttgtaaagacacttttttcccacggtttctatcttccagtttgggcagagggcaggaaaggcacaattcttggaacttgaataaggaacagaaattcctaatttagcctcagaagagacatctctgaaaaatactctaccaggaaaaactgaagtgtaaaatgatacctcaaagaaatcaatgctggaacccataggatcatatgtttcatggatgtgcttcaaaactatttctcaaagcaatctgttgcatcagtctttgggctaatgaaggctgccagtcacagttccatcatggaatgactggcatactctgtaatgatctataatactacaactacatcagaactgctctgccatacagatagtaccagatggtgatgtgattattgtaaaggcctcacactatccacctgtccttgcaaaaactcccttagcagacatgcacctagttgacatgaaagaacaattttgaaatgtgatttggaagtgttttatatctggccgactttgctttgaattattctttcatttgccaaagagctcttgcaaggtactgcacaatggctaggcaattattattattaatagtaaaaactgcaattgcttttgcaccaacttaaagagctaaagtctaagcttccagtctcccagcatccctcacacgatggagggcagcacttgagtctaatcatgcttgagatggtgattgcctgatatgtatattaaatactatgctgaagagacggatcctttcaatagtgtttttttcaagcatgttacatttagaattaagacctgcctagaaaataagctacttagtgctgaagaaacaaaaacttgacaagattcctaagttatcatttatatgtaatattcttcctacaacactgggtttggaaggataataaatacataaaaataaaattctgcagttaactaatatgaaaaagaggtaatgcagtgttgaataatgagaaactgctaattgcggtagctaactccaagccactttttttggactgctcggcccatcatggggcattccttactttggaagtagataagagcaagttggaaggccagagtcaggcaaggctggccaaatcccacttctgcaggctgctgcttgaatcatcctggcctgatagattcccacatgcagcacactgcgattcccacacgcttggatccggttgcctggactatatccgatgcttctgggtaagactgagtgctctgtaactaatgggcctggggtgaaaatgatccaagggttggaaacatcctaagccatgtgataacctcttttttttctttatatcccccacaagttctgatacaatacatttagaaaggaactcactgaagatttgctgaatgaagagagggatggaaggaaaaaggaaggaaggaagggtttatttgatgcagattcttcagcattttgttttcacagactcccttcttttcccctcttctggacccacctttttgccatctcaccgttgatgagcagcttcagcttagagggtaaagacaggcatgatcgcgactggccagcatactggccggttctctctgttagcagacttttgccaagggtttggatggaatgggtggctcttcaggtggaaaacaggtcgtgggggtcaggttttgggtgcctgaaactgctcttccttcactccactgtgccatgactggctcccacccgaagcttcagctgagctggcttgtcagggctcgctaggaactgctgagctgcatctgtccttacttggcgtggcttcctcagccccctccacatctcaagaacgtggccttgggcccctttctgctctgaccattttgcttgcctgggttttttcactgtctgccatgcgcagatcccagctgttcatttgtacctgacctctgactgctagaacctctccattcttacatctcatgtagttccaggtccccagccaggttctggatgttacccaagccccctccccattctccagcttcattctagcctacactttatgctttgccttaagcttttctgatactagctcctattaccatctctagtcttaattctgatagtgggactgctagctcctcttctttcaataataaagggctagctgtaactagctgtgactctgtgatacctaacgccagaagaagctactatattctatcattagtttccttgtctttctcagtgactaaagctaagcctcttgaaggtagagacagccataggaaccttcacttctcaatgaagtgttgatgaatgttacagaaaaaggaactctcaagaatggctgcattttacatctcatctctcaagttttactctgaagttactaaagccttcagcgaccagaatctaataaaggtgaatcaccaagtttataaatgaatgaattcctaataaattaaaaatataagggatagcatatgggtaataatgggaaggactgtgcagtttgaagtcactcagacctgggtctgaattctggctcttacagctaagccttcagcaaaccagttaacagctccgagcttcgaagttttattatacaaaggtgacaactaggttcctaagaggaaccttcgtttcccactttgtaaaatggtgataaagctaccaccttacctcatggactgtcaagaaactaaactaagataaagtatgagaaaaattattttgtaaaccttaaagcacaatataggtattaatgattactattataaattacatgtatctttgttcttatggcatctgagttaaaaacaacataaaaccctaacaggcgataaaggtaatctattagatatttttccctaataggttgtttttatgctgaggcatgcccccacacttataaattatgaaaacagaataattatctcttacattgcttgagtcaggctagtcaggaaggccggttacataatttatggaggactttttctaatcctctgctactctcaagaaaacagtagttgggattacatatagcaaaaccttctgaaatcataagaggcactgagacactttttaaaatccctcaaattggtctggccttaaaagatttttacaactcccaggacagttggcctccatgcagccctcaagcagggaggcggaggccctgaggccacactgccacactgggcctggaggcagagcccctgacagcctggcaaatcctctgaaaactctctcctttctaaggtcatgtcttcccatctataaaacatccgtttatatgtatttagaagaataaaagccattttttagacagtagggcctgttcttcaggattccaattacgtaaatctacaaggatccccttgaaaacaagtgaaggttttctctgaaccttctctggggcagacgctaatgaatgcaatactttcattgctcctgtaagattcacttcaaggctgctggcaaaggaacttttcttccatgagcacgaattggtttcctgtattaaaaaatgaggaaaatcattcaattgatataaaagccactttgagcaggctggtcaggaaatacaaaagtagaaattctcattgcatcatcttactaattgtatagcaccccagttgcaataaacattaccagctggctttttgcattttttttctactatgcaattttagtctgttgagtcctattaaccacaaatcatgtgaaaaggtgcgggaaaaatagattgagaatggcataacaagcatttgcagaamkatcagtcctggtcccaagtgatattataagggcaatagataggcataatgtaataacaccaagataccgtttgaaagggacccaaagaacccttgtctcctgaaagaaaaagtgtaaagatatttggttaggttgaacgtatgtatgctgtgttttgatatgacaattgctttcacataaagagatactttataaagtaccaaaaaaaatcatattttaaaaaacaagctcatagtattttcaccattttactggtttgggatattgaacatcagtctctgagtttttaaagaaaacataacaaaaaacccggaacaggactttaaattttctctgttctatccttgtcctttttatcaatagtttttatccctaaaataactaaaggcctgatgaaagaccctagagaatgttttcactgtagtagagaaactctttaagtctgagatgtagcacatgaagcagcagcatagggaagtgaagaagactgaagggaaaagaggggaccagtgcagaaaccctgggggcagcctgggaaggcagactaccccttggacttgagcatcagctgaattagatacacgcaaatgtgaagcttgaaaaaaaactgtacaaaaacaaaaatcacacccttcaaataacaaaccaagcaaccaatcaaactgtcattaaattttatcattaaataagtagcaaaaggtagatactatatagcaaccttctgtgcccatggatgcaaatgaatgaattgtctttaggcttgaatttcatctggctactcaactaggggaatcatctgctcaagaaagactgatacagagagccctgctgtctaagctgctcagggacactgggctgattcagtcagggccgtgctggtacctgctgctgctgctctctgctcagaggcatacagtgaacatccctttgttccttttagaccagtgattctgttctcatggtggctyacagggaggcatggaytgctgcaggctctgccttgtatcacactctgcttttccaaagagacgccaggcctgggccattttgcgaagtttagtgaggttgggtttaatctatgggaagaaagaataacttcaattagcaatatgaaaaggtaggtagcatacaggctgggcgaggtgactcacacctgtaatcccagcactctgggaggccaaggcaggcggatcacaaggtcaggagtttgagaccagcctggccaatayggtgaaaccctgtctctactaaaaatacaaaaaaaaattagccgggtgtggtggcgcatgcctataatcccagctactcaggaggctgaggcaggagaattgattgaacctgggaggcggaggttgtggtgagccaagatcatgccactgcactccagcctgggcgacagagtgagamtccgtctcaaaaaaaaaaaattgaaaatgtaggtagcatacaaatatttccaaagtctggctgttataatctgtttagatttctaacttctggattcaatagagattacagattgttttaaggatccaaggggactcagaactttaagtctagattcccagctctcagcaatggagaaaaactttcttcatatttttctttgtgaaacaaagaggttttaatgaagtaaaatcagctagttgagtcagacaacattagtacctgaaaactccatgcaagaaaagattttatatcccttagcagggaaaggttagcaaaagaaaagattttgggcagggcgcagtggctcatgcctataatcccagcactttgggaggccaaggtggacagttcacctgaggtcgggagttcgagaccagcctgaccaacatggagaaacgctgwytactaaaaatacagaattagccgggcgtggtggcgcatgcctgtaatcccagctactcgggaggctgaggcaggagaattgcttgaaccygggaggcagaggttgcggtgagccaagatcgcaccattgcactccagcctgcgcaacaacagcaaaactccgtctcaaaaaacaaaaaaaaaaggaaagattttggaaagcagcaacagggacattcctgttatgttctccatgttctccttcactgaagattataacaaggacagaagttcttcatttaagccattctgtgccttttctgcattatccacattgtagtttgcaggttgctgggtaattagggccaaagcataatgtagagatccccaagcttgggtccctgtctgatgatcctcaaaccataactcaagatccttggggatggccagctacagtcacagatcaccgtttccagcaggtactatcaagaaactggaagttgaggctctatattgccaacagtgaatttgctgtgcttctaccaactttcagtagcttcagaaagaactgcatattatgaaacctagagccagcaggcaatagatattcagggtacataagtctgtacatgtgttaagttttaaaatacaaagccattatgtaggtgacctgacagttcagtctaagttycattttggatttgagctggaaaatgaaatgggtgaggctttatgtgaaacttccartgcagattttgcaaaactctcctattttggaaaggttaagacagattacagttgcatagtaaaagccagaaaagaaagagaarataaactttgctccctcctgctcctgttagtcattaatgtacctgtttttcctgttccaagtggtctatgtcagctaacggcagcatagaaggtctcccgtgagyacactggaatggcagctggcatgaggacagagcttcaataaggcggcaactttcctgtaagctcaggccatcattaaacttaatggcccctaaatgaaagacagaaacaagaaggttatagtgtatatagtgggaaaccaatgctgaccttgggtcactgccaaatatctggaaaaagtaacatgtttcttaggcttctttaatgaagctttaatcctgcttgaaattggtgcttataggccgggcatggtgtctcacacctgtaatcccagcactttgggaggctgaggcgggcagatcatgaggtcaggagttcaagaccagcctggccaatatggtgaaatcccgcctctactaaaaatacaaaaattagccgggtgtggtggcacgcgcctatagtcccagctacttgggaggctgaggcagaagaatcacttgaacccaggaggcgggggttgcagtgagccgagatcacgccactgcactccagcctgggcaacaaagcgagactccgttctcaaaaaaaaaaaaaaaaaaaaaaagagggaaataaattagtgcttatgaccatggatgaaactaaggcttcaggactgaccttctgtctctcagctttttcttacggagtatttgtatttctaatctctgtaggaggcattccttaacttgttaggatctggctttcagagtttttctccaagaggcaagagcagtatttttgcctactctttatgggtttgtgaagttggggttatctttctccatggatcgtccaatagcaatctctgattgtttccttacaatgttcattttatttgcttctttttttctaatttccataataatcttcctaatctaaactctcatattgttataacctgcctttatgcacaatttacccagtcaacaaatatttattaagtatatactttgtattgggagctttgtcaggcagttagtgagacagataatttccatcctcatggcgcttatggtctaataggggagacaaacatgaagcagataattatmcaataatttaaatgataaatataggtgctataaaatacaggatatgaatatataataggaagaccaaacccagtttaggagcttaaggaaggctttcctggcaaagtagtattcaagctgagactttaggttaagaaagacgtggctaattgaagaaggagagaaaagtgtttcaggtagaggagaaggccagtgcagaggccccgacgctgacaaatgtttagcacacaggaagcagaagaccaaaaaagcaggctgggatgtaaagaacaaggtggagagtgatatgacgtgacactggagaggcaggcaggggccaaatcacgaagacccttgtgggccacagtaaaaaatcacatttctatcccaagagcaatgggtcatcattgacacattttagttagaagaacaacatgcttggagggatgtttcaaaaagattcctctgggtgctgagagaagagcagcttgaaagggagccagagtggatgtgaagaactaagtaagagagctcaacagtggcaaaaatgagggaggagccagacagactgaatcagacggaccgaagatacattttgaaggtggcaatgatgacatttggtgatagaggagtatgagtctgttctcacactgccatgaagaaatgaccaagactsggtcatttataaaggaaagaccatttaaatgactcacagttctgcatggctggggaggcctcagaaaacttacaattatggcggaaggtgaaggagaagcaggcaccttcctcacagggcctcacccagctccccattttctatattgtatcatattaccctgctcaagaaccctcaatggtgttcgctttggcagcacatataataaaattggagtgatacggagaagattagcatggtccgtgcacaaggatgacatgcaaattcatgaagcattccatcttcattattattattattattattattattttgagatggagtctcactctgtcacccaggctggagtgcagtggcgtgatattggctcactgcaacctctacctcctggtttcaagtgattctcctgcctcagcctcctgagtagctgggattacaggtgcccgccaccacgcctggctaatttttatgtttttagtagagatggggtttcaccatgttggccaggctggtctcgaactcctgacctcaggtgatccatccgccttggtctcccaaagtgctgggattacaggcgtaagcaaccgcgcctgggcgcattccatctttttacaaaaaccctagaagaaaacctcagaaataccattctggacgtaggccttggcaaagatttcctggtaaagactctaaaagcaactgcaataaaacgaaaattgacaagtgagacttaattaaactaaagagcttctccacagcaaaagaaactatcaacagaatagacggacaacttacagaatgggagaaaatatttgcaaactgcatccaacagaggtctaatatccagaatctatataaggaactaatatccagaatctataaggaacttaaataaattaacaagcaaaaaccaaaaaaccctattaaaaaatgggcaaaggacatgaacacacacttctcaaaagaagacatacacatggccaacaagcatataaaaaatgttcaatgtcactaatcattagagaaatgcaaatcaaaatcacagtgacataccatctcacaccagtcagaatggctggtattaaaaagttaaaaaataacagatgctggtgaggctgcaaagaaaacagaacacttatacactgctggtgggaaatataaattagttcagccactgtggaaaacagtttagagatttcttaaagaacttaaagcaaaactaccattcaacccagtaatcctattactgggaatatgcccaaagaaacagaaatcattctaccataaagacacatgcatgtgttatgctcactgcagcactatttacaatagcaaagacatggaatcaacctcaatgctcatcaatggtggattggataaagaaaatgtggtacatatacatcatggaatactatgtcgccataaaaaagaacgagatcacatcctttgcaaaaacatagagctagaggccatcatcctaagtgaattagaaaaccaaatactgcatgttcttacttaaaagtgggagccaaacattgaatacacatagaaacaaagaaggggtaacagacacctgggcctacttgagggtggagggtgggaggtgggtgaggatcagaactacctattgggtactatgctcattacctgggtgacaaaataatckgtacaccaaacccctgcgacatgcaactcacccatgttacaaagtgcacatgtaccccctgaacctaaaatgaaagttggaaagataaaaaaagaacgcttgctaattctaatgccttctgtatcaaatccaaaggttttgctgtgaccttctaggtttctgttctcttacctgcctagtttcttgatactctttgctgcttctcatataactaacttgtttctgttctgcctctctgcacaggctgtttactctccctatagtgaattcccctttccatgctatgaacccatgttccccagctcattcaaaattcatctcaaaatgcatctcctctaggagttattcctccactcatataggtcaggcagcactatagtcaaatttttgtgttgggattttgtttttgtaaaagtgatttttaaaagggtatattcagtttcttgatctaaattgtattctccaagagtcaagtagtaaatgtaccctctgcctctttygtaatcccggcagccctgccagggctctgcatgcagaggtgtttgatcactgctatgttgaagggcttaccatggcaggcttgggatgccaacaccttctggacagtcagtggcaatgtcccttggatgcctccggtggtctggagtagctaatgcataaacacgttattaacaggaaaagaaaayggaacaacgaagccttttatgtgtggtgcttctgtgtgaaaccccaaaataaaggaaaagcttacctccagttgttctcggataaattcctgcaaagcaaaaggaaaatcggctttaatctacrgttatgttttacttgccctttgatagtttacaaaatatctcaattttcttctttaaatcatgcctcctgaaagaaagagttccagcaatacagcacttgggtacaaatttatttgttgtaaggcactttgaatatgaaaaaaccaagcaactgaatagaactcttattgaacacagaatatatttagctactgagacttcctccagagatagcttctcaactaatgaggttatgtagctggtgagagtagccttgatgattcaaccaattcaaaacatcaggaaggcttctcactaaaaggctgtctgtttgtgtgtgtaatcttagccagaacaagcgtaatattacacacaaactgagaataaatacacaacaaccatcaacacaaccactgctcagtataacacttgcttaaatatcataaacataagtaaacagtcactttagttcccacgggctttttggggacaattcccttcaggtcagaaagtttattttctgaggccctttgttgagaaatttctcctcccttgcatgtctctgtccctggggtaaccttttcaatagttatatccctgtggatattaatatttacaaaagaagcttaaagaaatttaaagcagacactatttcatgctaccaatttgtttaacctctggaggtaaaaagaaaaaaacctgttgcacatttaatgatttctttataagaaaatcatttctttactcctggaaaaggctatgtgtaaatctgctcctaagattacaacatggtaccttttcttttaaaaccagactcaggaaattctcttccctccttcatctatactctagtctgccatgcctataaatgrgcacagttatcaagagctaggtagtagatactatattacatataatttaaaaatcacatgytttcccaaacaaacctaaacagaaagatggtctcataagactcaatccactgacaaagcttagtgtggatggagagcaaacattcttgtgtttgtacatctgggatggtaaaacatctgtttgtaagcttagtgaaggggtgatgggtctcatctcagtccattttatattccaatggtctgtttaatgctggataatttaatatttttattttattttttatttatttatttagttagttagttacttattttgagatggagtttcactcttgttgcccaggctggagtgcaatggcacgatcttggctcaccgcaacctctgccttctgggttcaagcgattctcctgcctcagcctcctgagtagctgggattacaatcatgcaccaccacgcctggctaattttgtatctttagtagagacagggtttctccatgttggtcaggctggtctcgaactcccgacctcagatgatccgcctgcctcggcctcccaaagtgctgggattacagttgtgagccactgcacctggccgtatttatttattatttttaattttttgagacgkagtctcgttgttgcccaggctggagtgccatggcgcgatctcagctcactgcagcctccacctcctcaccaggctagaagatagagctttatagaaggatgtattaatgatctttcaactgctaggattcaaatagctacctcctcaaaacaccaaaactgttccagcttcttccagaatcacacaaagtctctcctgatcagcctgacataggataatcaagattttatgaaaccagaggtttgtttccatttgaagcaaactccttaacagtagtcttttaagttccttcaggaaaagtttttcttataattttctggttacatattagggattgaattacaataaaagactctaacagatcctatcttttggatttaggacaatttggagcaggggtcttagagaaagcatgtctgtggggaggaaagagctttgctggaagcagagcaaatctttggatctgtctgatccaaaggcgattctggaaagggcaaagccaagatgacccaagagctgactgacagctgctcttcctcttgaatgtttcccccttggcctgcaaacctgcttacgtcttttttgtcttaaagcaaacaaacacctttcctcagccttgaatcccaccccacacttcccaaccacttctaacctttagctctcaccccatctctcttcttctgtgtgtagccaaagttcctgaaagagttgtctacttagcttcacttcctcctgcttcacgcactcctgactcactgcactcttatcttctgccccacctcatccccaggaaatgattccacaagacaactaatgtcctcatgacagtcaagtccagcgtttcaggctctacttcatagccgttattgaccattccctccttgcttaaaactttccttagttttggcaatattgctttttcctggttttcctcctccctctctaaccaagtattttcagccatccttagaatttcctcttttcagcagagctttccagaccttttccaaagcataygcaccctggatgctgatgttccacaggctccactcttttstctcttccttttcactctccatattctccctggacaacctcacttcctcaaggcccttctccagcttctgatactatcaatatatatatactgttaactctcagatagatatgtacagcccagatttattttccaagtaccagatcttttaagtgtgcctatccactgggcattccacctgcaggcacattcactgtgtctaaacccaccttcacgatggaactcctaggcaggtttgttcctcctcatctgtgtcccttctctgtcaatggcaccaccatccttccagccatccatgctacaaccctcagaatcactgttgcttttgttttctcctttattcctttcacgtttgattgctcaccaagtcctcttgcttctgcctcccaaattctgtctcaratatgtcactcctctctactccctctgctactgacycagtccaatcctcatcttctcttaccttaaccactgcaataacccgtcagctgctctccctgactcaaatcttcccacataaatccatcccccaatttatctactacatctatcctctaattttagattttactattttagatattactaaagcacttcagacttctagatgaggtgggtgtggatttgcctgtgctccaaatcaagaaagctastgataaaggagaaggaacaatcatgaaaaaagcaggacaccataaaaaaggaagagtgagatttggggaaaaaaacacaacttctggaaataaaaaatatagccattgaaataaaaaatttagtcactgaaataaaaaactcagtggataagctaaacacataattaaacagaagatgaagagatactttagttcactggaagataagtgaggagatttcacagaatgtatcacagagagaaagcaatgggaaatatggaagagagttgaagaggcatgcagagtagaaagataaggcccagtagatatctgacaaaatttccaagagacaagagagagaatgggaaagaaacgtttgaggtgataatgactgcatactttccaaactgaagaagcatagtgaatctccagaaggaaatgaaaataaatccatacaaagatacatcatagggaaattgcagaacaccaaagacaaagtgaaccatcgtaaaagcaaccagagggaaaatcagattacctacagagtaataattggattgactaaggacttcaatggctaaaacagaaagtcaggctgggtgcagtggctcacacctgtaatcccagcactttgggaggccacggcaggcagatcacctgaggtcaggagtttgagaccagcctggccaacatggtgaaaccccatctctgctaaagatacaaaaattagctgggtgtggtggtgggcacctgtaatcccagctactttgtaggcttaggcaggagaatcgcttgaacctgggaggcggaggttgcagtgagctgagatcatcccattgcactccagcctgggtaacagagtgagactctgtctcaaaaaatgaaataaaataaaataaaatagaaagtcaaaagtagtgaaatattttcaaaatgcgggggggataactggcaatgtgaaattctgtttttagctagataatcatgcaagtatgaagacaaaataaagatactttaaaagacagcttatcattcacggacttttttttttttgagacagagtttcactcttgtcacccaggctggggtgcaatggcgtgatctcagctcattgcaacttcygcctcccgggttcaagtgattctcctgcctcagcctcccgagtagctggaattacaagtacctgccaccatgcccagctaatttttgtatttttggtagagacagggtttcaccacgttggccaggctggtctcaaaactcctgacctcaggtgatctgcccgccttggcctcccaaagtgctgggattacaggcatgagccaccatgcctggcccacggactcttactaaaataacttctatttatttttatatttttgtattttttgtctcaagatctgtttgtggataaaagatcttgtaagagatttacttcagtaaaaaaaaaaaaaaaamaaaaaaaaaaaaaacccaaaagaacacagaataagtaggatgcaagaggcaatggtgaacaaagactctggtgaacactttttttaatctaaataaagattgactataaaataaatgaccaccagggaattaaaaacaaggtggaattaaagtactagacagcaacatggaagatgggaggagggtgatgggagatgaacagtttgtaagattttggtacagttaggaagaggatagagaagtgaattacttttaaactttgataagtatgcatgctaaaagttaaggctaatctctaaaaggatataaatggaatatataacttctaaacgagtagagcaaaaaaaaaaagagaaatacagaaaactataatagaaaacaggaaaggagaggaaaaagacaataaagacaaaataaatgatatttgctataaaaaaagaaacatataagtaatcaaaataaaaagtaatagttctctctaatacctccaatgccacagcccagcagtagctttccaaacctttaccaaaacatatatgtaaagtaatcatatttggaatgcaatctaaaatggaccttactctcctgcttaaaagtttycactggctgcctataggataaaatgcaaactacttagtagaatatgctaaattattttatgatttgaccttgacaacccatctagccaactcccatccagtcaaagatccaagtataacttctgatttccccccaatttttttttttttttttttgagacggagtcttactgtgtcactcaggctggagtgcagtgcagtgatcttggatcactgcaacctccaccttccgggttcaagcaattctcatgcctcagcctcccaagtagctgggattacaggcacataccatcatgcctggctaattttttaatttttagtagagacggggtctcatcatgttggccaggctggtcttgaactccagacctcaaatgatccgcccgccttggcctcccaaaatgctgggattacaggcgtgagccactgcacctggcctgatttccccaaatcttaactaccaatagcctaacgttgatcagaagcattaccaataatataaacagttgattaacacatattttgtgtgttgtatatattacacactgtattcttacaattaagtaagctagagaaaagaaaatgttggccaggcgtagtggctcatgcctgtaatcccagcactttgggaggccaaggcaggtggatcatttgaggtcaggagttcaataccagcttggccaacatggtgagaccccatctctactaaaaatacaaaaattagccggggcatggtggtgtgcgcctgtaatcccagctacttgggaggctgaggtaggagaatcgctttaacccgggaggtggaggttgcagtgagcygagattgtgccattgcactccagcctgggcatcgcaaaaaaaaaaaaaaaaagaaagaaagaaagaaagaaaaagaaaatgttaagaaaatcataagaaacagaaaatatatttattattcattaagtggaaatgaatcatcataaaggtcttcaccctcatcattttcacattgaataggctaaggaggaggaagaagaggaaaggttggtcttgctgtctcaggaatggcagaggtgaaagaaaatctgcatttaagtgtacctgygcagttcagacccaagttatccaaggatcaactgtagatcttaatttgagccatatctattgatagttccctaaacataggatgtatctcaagtctctgatatgtattcctctgtctagaatgcccttctcccctcttctgtactcagcactttcccactattctttttttctttttttttttgagacagagtttcactcttgttgcccaggctggagtacaatggtgcaatcttggctcaatgcaacctccgcctcccaggttcaagccattctcctgcctcagcctcctgagtagctgggattataggcatgcaccaccacgcccggctaattttctatttttagtagagatggggtttttccatgcttgtcaggctggtctcgaactcccgacctcaggtgaaccacccaccacggcctcccaaagtgctggcattacaggtgtgagccaccttgcccagcctagtttcccactattctgtaagacttttctggctgtgtgcagtggctcatgcctgtagtgccgggggtttgggaagccaatgcaaggggattgcttgaggccagaagttcaggaccagcctgggcaacatagtgaggcccccatctctacaaaaaaaaaaarggaaaaaattagccaggcatggtggtgcgtgtctgtagtccgagttacttgggaggctgargcaggaagattgcttgtgcccaggagatcaaggctacagtgagctatgattgcaccactgcactccagcttgggcaacagagtgagacctggtctctcaaaagtaaaaacttttcttaagaaaacagcttttctgtgacattttcattgacttcacctccccaggcacacaagtcattctgtgtttccataacacttctgaaaaactatcttggtgcattctagactcttagttttcattacctttatcactgggaagaaagcaaaacacatacctctactagccaaagttcactgactataattctttaaatgcccttcttccttattttgagctaactcatctctgaatttctagctcctggcacacmgcaggtaaataccatgaatacttgttgaagaaaagatgaattcagagaatctacagacaaaatatgaggttaccatcactcagcaatttccttaacatctrcagctgtgtcttacctccacaatactcttggtcacagtagatcttcctctccgaagttcattggcttctctttccacaaaacatagtggtacttttcccacaaggaccagagaatcactagtgtctggaaatacaaattcaaggcccagatcttccagatttttgtggtaacacctaaagagataacctcaaatgttaaaaaaaaaaagagtgctacttcatttgcacttcactactggttccaaatactacttaatagtttttcaaaagctgccacagggcttaacaaccgtattgtttttctcacacttatgtgtgggtgtttgggattttttattatcaaatttcctttttgaattacagtaacctttattgtttttctcttttccattgggaatcaatctgtgtctaagtcttgtttctaagtgtgttttcttcattgaggaactgctaacttctggctgctggcacttaagggagtctggcatgaagaaaaggtctgagagtgatttgaatcagcattaaagcagggaggtaattaacagcccaaggaattgagaagtcctgactaacgggatgtaagtaaatagatctgcctctaatataaattatgtcatagggaaaaaaagatttactggcagtatcatattcccaaacctgaaacatattgggagaaatttctttttcattttcaataatttgtgctgcctagaagaggaaaaatatcctatcttgtgactcactatatgattygccccttccttacatcccaatgttttactttcttcccattatgattacgataatgaaaactaagagtctagaatgcaccaaagcaaagcagaatgggaccaattactgcagaaactttgctttcacaaagcatggcataaacacagactgttccaagaaatgagaagagtgttctaagccaactgctggaaaraattatcagggaaactctatcctatactcttcagctgggatacagtggaaagaataggctgggtccagtggctcacgcctgtaatcccagcactttgggaggccaaagtgggaggatcgcttgagcctaggagttcagaccagcctgggtaacatggcgaaaacccatctctaccaaaaaattacaaaaattagtccagcatggtggtgctcacctgtagttccaggtacttgggaggctgaagtgggaggactgcttgagcctggaaggtggaggttgcagtgagcagagattgtgccactgcactccagcctggacaacagagtgagaccatgtctcacaaaataaatattttaatggatgattggatgcagaaaaaaatatattttaaaaaaggaaacaaacagcctgtggagtcagacgacctgcctttgagtgcctgctccactacttaataactgctatgaccttagacaagtcttgtaacctctcttggtctcatctgagaaatggaacaatagttatgcttattcctcacagaattattgtgagaattgataccatcaacatcacattctcatggtggtactgaccataagagtctcctttgttcctctgtcactgttatctctagcggaggaattagagtagaagacagtaattttttccgaccagagccttgtgcctgttgcttctcgtaggaatctattggcagaaagatgaatgggttaagagtaggaagggaagtcttctagattcagataaaaataaagcacggccttgagataatcattctaatgcaaagcagaatgtttaatgttcagttttagattttggatttccatttttaaagtcaaactaataaatattcagcctattaacaattttggtagtatttttcaaaataagaaatataagacttgcatcttacattcagatgaacaagccaatgttcctgtagttaataaatgttgttttgatgacagaggtgaataatgtggattaccaggaacatatgtgggttgaccacacagtcttatggctccagaaggcttccctttccttgagcagggtctcccagtctctggagagaattagtactattctcaaatggtgcagggcctgtagaggtaagtttttctaacactgtttttactatatctttcccaactcttaggccgtcattttataaggaaaagtgaaaacagtagtaatatcattgccattctagtccatgaagcactccttaggtccttgcctaactctttgacattactcattggccacaggagtaaagactttcctggtattttaccacttggtgaacacactgcctcatgatgaggaaaagggtagcaaaaaaaaacatttaaaaagcatatattgctttggaaagatagatttaaaaaccagagatattggttgtctctggggagagaaactaggaggggtggggacaaggatagaaaggagactttattatattcccttttgtgcctttcagaattggatctatttgattatactgcatattcaaaagcaaactaaattttaaaatcaaaacagcatactgggccttctgagctgccactggtctctgcctgatggagtgtgggaaggcatgccaagatcaccgggcatatggaggggcagagctttgtgctggatgtcagagtaagcagcctatccttgcgtacttctgggttgttaataacatctggcaaatatgcctctgaccacataaataagttcacatctttcaattagtgaactaccacattctttcaattataacacaggccaaactgcaggactttagtttaatttttgaacatacagtacaaagtgtgctttctcacaacagytgcagttagaaaagctctttgaggtgtactgattctgctgggagtctcaaattttttctggctgcaaacagatccttaccaatgataagctgctccagacgtatacgctcatgggcagcgtgctgatccaccagcacgagcaggttcccacctagatgagcaaggattgtgaactttgattctcagagcaagacgacaaccatcatgtgtgttgaggacagagaagacttaattcaaactatctaacaacagcataagacaaaacattctgaggagtaacaattgtatcttttatttcctaaaacatgaaattatggggaaaatgatagcaaacttatcccatatgtttgaatcccagatccaattctgaaaggcacaaaagggaatttaataaagtctcctttatactcttgcccccaccccttctagtttctctctccagagattaccagtattactaatttttatcctataagttttattattttccccataatttcattttttaggaaacaaaaggtaaactaagaaactctttagttcaccagcatctcatttagaaaacatagtcagggctgggtgcagtgtctcacacctgtaatcccagcacactgggaggctgaggcgggcggatcatgaggtcaagaaatcgagatcatcctggccaacatggtgaaaccctgtctctactaaaaatacaaaaattagctgggtgtggtggcacgcgcctgtagttccagctacttgggaggctgaggcaggagaatcgcttgaacccaggaggtgtaggttgcagtgagccgagattgcaccactgcactccagcctggtgacagagtgagactccatcttaaaaaaaaaaaaaaagtcaaagtggcatttcctcaagtttgaagcttgaatatataattcttatgtttaaatactgattttgccttattaattcaactttaatatgataaaggatcgttaaacaacacattgttataatcagctaaccttggtgtacaagctacttggaaacccacaaagaatgtacttccagtgcactttagatcacaagccggagaacgttttctgaagggccagatcataaatattttaggctttttgggccacacgatttctgtcatgcctactcaacaattctttttgagccaaagcagccatagacaatatgtgaatatcgtagctgtgttccaataaaactttatttatggacactgaaatactaatttcatataattttaatgtgtcaagaaatagtcttctttttttttcccaaccattaaaaaatgtaaaaaccattcccatctccctggctgtacagaaagaggtgatgcccagattcccctcgggccatgtttatcctgccttagacttgggcttctcaaacgttcatatcacataccccctggggatcttattaaaacacagattctggctgggcctgtggctcatgcctgtaatcccaacactttgggaggctgaggagggcagatcacttgaggtcaggaattcaagatcagctgaccaacatggtgaaaccctgtctctactaaaaatacaagaattagccgggcgtggtggcaggtgcctgtagtcccagctacttgggaggctgaggcagaagaattccttgaactcgggaaggggagactgcagtgagccgagattgcaccactgcaatcccacctgggcgacagagcaagactccatctcaraaaaaaaaaaaaaaaaaaaaaagtaaagaaaaaaagagaaatttcaacagatccattttgcttctttcaacatctgcagattttgtagttacacccatcttgagtatcattagtagagattctgatctcaaaaacaacaaagaattccagataatgaaaacttaaaaaaaaaattggccaggcgggttggctcatgcctgtaatcccagcactttgggaggccaaggcgggcggatcacctgagatcaggagttcgagaccagcctggccaacatggagaaaccccgtctctactaaaaatacaaaattagctgggcgtgggtggcgggtgcctgtaattccagctacttggaaggctgaggctggtgaaccgcttgaacccaggaggcggaggttgcagtgagctgagattgcaccattgcactccagcctgggcaacaagagtgaaacttcgtctcaaaaacaacaacaaaaaaaaactattacttttctagaaatagtaaaactataggaatttgatcttcacaaattctatattcatgataattctgacagaactttaggttaatttgcctttgatctgctatgacatttactaaacaaggtaaagggaatattttgaaatacatagagaataaatgctctaaaactttagcacttgcctgcaggtactatcaagctggagccagccctccactgctgctcagggctcagccactcaggccttttcagggactttatcccatcaggcatcccttgcaaatgtgctcaagtttctcccattaaaaaaaaaaggtcctctgtcaccctcaccctctgtagtccctcttccgtgtcatgggcacatttctgagtatctccttgcagtctccattagcaccatcagcatctcgtcctgtctattctctgaaacagctctcacttgctaaaatccctaatctctactgtcacaaaatcagatgatcctcatcttacttaatgtcttggcagcgtttggcatgacatcctggttttccaacataacattcttctgttttcttcctatttctctagctgttcyttcacagtctcttttgctggttcatcctcttctaccgagctcttaagtgctagaattattctagattcaagacctctcctcactcttcttttttctaggtgataacatttatatccagggtttcagtgatcacttttctgcatctgatggctcaaatttgtatctccatgtcagaacacttgtctaggccagacttgtaatatccaaccacattcttgacatctttttattttwtttttttgacagagtttcgctctgtcacccaggctggagtgcagtggtgcgatcttggcgcactgcaacctccgcctcccgggttaaagcaattctctgcctcagcctcccgagtagctgggattacaggcatctgccaccatgtccagctaatttttgtatttttagtagagacagcgtttcagcatgttggccaggctggtctcaactcctgacctcaggtgatccacccacctcggcctcccaaagtgctgggattacaggcgtgagccaccgtgcctggccaccttgacatctcttctggagcatttcaaagactgaactcatgattttcatcctctctgctctgcctgcaacacgggtcctgcaacatcatcaactcagctatggaggccagaacaccagaagtcatcttttacatactttccccatatccaatccatcaccaagccctgctgactctatctcctaaatatctttccaatacattcactgctctctagtccaccctggtcccatctaaccatgtctcagatattgcaatattcttttaacagtcaatctacagttaactgggactccacccctactcctactccattctccacactrcaaccagagcaatctttttaaaatgcaaatgtgatgtgacatgtaccaccccaaaaacaacatcaaaatacaaatgataaaaaatgaaaaaaaaaagctttcaatggtttccaacagtattgggacaaagcaaagcttgtagctggcatttaagatctgactcctacctacttctctagcctcatctccagttccccttgccctgtttccactcactgaggagaataaatcacaaattgcatggttgttccctcctttctttacttagttaactcatattcatattcagacctcattttaccaagaagcacttccctgaactccctgatgaaatcaaatctcccaatacaggttcttagagcatcttgtatctctttctccattacaggggctagaactaaaattttatgtttgtgtaattatttttttctcttgcatatatatcttttctcattattgtatccctagggcctggtacagtccctggcatacaatgggcactcaattaatacttgttgaatgagttaatatatttacaaactattattgtttcattagagcaggtcaccaagagattctgtgtaaatattgacaaacctagcagagttcattatatacactttctattattataaagggaaaacatgaaaatattattaaaaagtcaaacaatagaaaatatttaaaagaataaaagatgggctgggcgtggtggcttacacctgtaatcccagctgttagggaggcagaggtggaaggatagcttaagcccaggagttcragacctacctgggcaatatagcgagaccccgttctccacaaaaaggaaaaaaaaaagacaaaaagagtaaaagttgaaatatctcctttgcacaccctcattttcactcccaaagtaaatactcttgatagtttaatgtgcatcctgagtatatgtatgtgtatgaacataaaactaaatgtctgtcgcccaggctggagtgtaatagcgcaatctcggctcactacatcctctgcctcccaagttcaagcgattcttgtgccttagcctcctgagtagctgggactacaggtgcacaccaccatgcccagctaatttttgtatttttagtagagacggggttttgccatgttgctcaggctggtcctgaactcctggcctcaagccatccacctgcctcacctcccaaagtgttgggattacaggtgtgagccaccgcacccagccttcataatattcttagttttagattggctttccctaatccatccaaatcattgaaactatattatataccaaaaataatcattaaaaaaaggttacaagaagaccasctggttartcattcaggctaaactccattcttacctgcctcgccattctcttcagtcttagtgctcatcaaacaggcaataaacttgttatctacttgctggagaacctgtcagacattcaaataagtggtacaacactaaataaaaattaacaaaggcttatttgcatagaaagatacagaactgtattttatttagagttgtttgccttatcacactcctttctttgagactgggtaaggttctgatgaaccagaaaaagtcactaggaaggatgaaagaatgggcaggtggagttgatcagaagatgtaaggggagggaggcgacaggggaagacagactcccacgtctcagagtggtgtgctagcaatactttagagaaggcctgagatgttcccaacagagtgactcttgagaataggtaatgtgaccagagattgctaacatacaggctgaaataaatttttaaaatttatrtgaaagcaaggaaaacgattatggagaaactagtctatttttatttttatttatttttaatttttttttttttgagacggagtctcactttgtcacccaggctggagtgcaatggtgtgatctcggctcactgcaagctctgcctcctgggttcatgccattctcctgcctccatgccattctcctgcctcagcctcccgagtagctgggagtacaggtgcccgccaccacgcccagctaattttttgtatttttagtagagacggggtttcaccgtgttagccaggatggtctcgaactcctgacctcatgatccacccacctcggcctcccaaagtgctgggattacaggcgtgagccagcgcgcccggctgctagtctattaaagaagtaagttaaaagccactggtggctttagaccttggtggttcctctctgtctaggtacttgaggctctccaatacccccgagcctataccactgccccagggtctatttctggatcaactgcttgcctgctctggtaccaggtcaatgccaggttaggagtttacccaaatttgttagcctcctaatttgtttccgtactgaaaacaaagggaataagacagccatggtggtaaacacaaggcaaaatagaaaagcagatcagacaaagggtcccttttgtgaaatgacttctcaatatgggctttcccaaacctgtgtaggctcacacaatagaaggtaatttctaaaagggcactgttgcacacttaaggacaaggtcactaaaggactttgatttataaattattgccaaatataaagtcaatatataatcttctgcaggagaaccttgagaatccttgaaactgtcagcctgaatccataattcattccctccaaacctacttacactactaaagatatttctttctttgtaattataattaatcccttgctttttcttctgatgataaaagttytagtaagaacacacacacacacacacacacacacgtgccttgaccaaggtggtctatatcattaaataaatcaaattttagaagagttaggccatatatatatatatatatatttatgagattttgaagttaatcttttacctgcattgaatgaatcattcctttggtgaaacgatagggatacaagatgttgtgaattttaactgctaagctctcagcctggccactgcttacatcaacagcaacctagaaagactcagcaaaatataattgaaattttaatttttgtgtcagaattgttttaccaaagatatcagagtgctttaaaagcattcatttttatttagcctactagaggtgggtttaattcagggaatttatagaaattcaaaagaatcggccrggcgtggtggctcacacctgtaatctcagcactttgggaggctgaggcgggcagatcacgaggtcaggagatcgagaccatcctggctaacatggtgaaaccccatctctactaaaaaatacaaaaaattagctgggcgtggcggcaggcgcctttagtcccagctacttgggagactgaggcaggagaatggtgtgaacccgggaggcggagcttgcagtgagctgagatcacgccactgcacttcagcctgggcgacacagcaagactctgtcacaaaaaaaaaaaaaaaaaaaaaaaaaaaaaaaaaaaaattcaaaagaatttatgaataatgagtcttacataaaaatttttgcttataaacaaaattactgacaaaacaaaaaaaattgtttcacaacaacaatttgtctatgttccatgatcaagtcctcaaatgatatcttgaggaaagaactggtaaacaaatgctcatctattatacaccctgtttataacatgcacagtacattctgtgaaaatacactgaggagagaacatccatgcggggccaatgaggaactgttcctccagtagaagatgtgtggctttatctaatgataacaatttcattatcaccaccctgaatactgtgccaaagctacaagtcagggtttctgagagtggtaaacacattcactgttctcacattgattatacatgtttaatccaaaatgcctgagttcccaaatgctataaattttatttctcccctctacattaaacagtaatttccaaatacataatttggaaatatgcccagtttccaatcataattacaaattaatatagtcttgcatgcccatacccagcttaaataaaattcaaattttatttttaactaatttacttattttttaagagatggagtctcactgtgttgcccaggctatagtgtgcagtggctagtcacaggtgcaatcagcacactatatagccttgaacttctggcctcaagtgatcctcccacctcagcctcctgagtagctgagactataagtgcatgccactgtacccatcttgaaactcaaagtttaaaataacaggcaaagaaaggctgggcgtgatggctcacacctgtaatcccaggactttgggaggctgaggcgggcagatcacctgaggttgggagttagagaccagcctgaccaatatggagaaaccccatctctactaaaaatacaaaattcgctgggcgtggtggcaggtgcctgtaatcccagctgctcgagagactgaggcaggagaattgcttgaacctgggaagcgaaggttacgtgagccgagatcatgccattgcatttcagtctgggcaacaggagcaaaactccatctcaaaatttaaaaaataagaagaagaagaagaaaaaaaaaaggcaaagaaaaactgctacagacccacctctggataacgggcaaatactggattgtcccattctgagaacaaagactgaagcgattcgctactaacagtatcatccacagtatctagggcaaaagggaacaggtaaagttggcatccagaaccacagggaaaggagggaatggcatttcctgtttggtgagccatagcctcaagaccaaaggtcacgtacattgtttctatgttctacaaatgttcagtgtttgctgtatctctaaattattttgatctgttactttttaaactagagttggtgactgtatcttctggcattacagcttttctccaaactgttaaaagagatattgtggaatactgacagagaagctatggctcaaatttatagccttactgcctttaagcaaaatataccttatctatttttaaacatacacacaaaattgatgtctgtagctttttttgaagagttttgcttacataaaactacagcaacttggagtgcaagtccagcctttttaaaaataagaaacatgtcccctaatcacaagacaccacagactatgcataatcagcaaatattgacctcaagtctggaaaagtaatttctgacctaaatgcatgcgctgaattaattagttccgctgttaaacagggccgtggggaattcctgattccagtacagcacagctggcactgatcaagcttaatgcaagcctgctttgttttttgagttaggtggtacgatgtgtactgtgtgccccagcactctctgccacccttacctctgttatcctgtctcatcacagtcctctctgctcgagctctcggaaggaaaggaagaacaaggtcgcttctaaaaggttgacacctgtactgagaccctaaatataagaaagaaaaacctagaaatgtgaacttaaaatacaagtaaactctttaaaaatttaatcmcataaaacctctttctgcacaaactgagtcaagacataaagcagactactaaacactagattgagaatcagaaatcctttaatgaaattatgctgtccatataggactctatattaatgcttagttccattatctattcataccagacagaatgaagacctagaataggtcactgtgattctcactggggggcaattttgcacgaggggacattggcaatgtcttgagacccttttttttttttttgagacggcgtctcgctctgtcgcccgggctggagtacagtggcgtgatctcggcttactgcaacttccgcctcccgggttcaagcaattctcctgcctcagcctcccgagtagctgggattacaggcatgcgtcaccacacccggctaatttttttgtatttttagtagacatggggtttcaccatattggccgggctggtctcaaactcttgaccttgtgatccacccgcctcggcctcccaaagtgttgggattacaggcgtgagccactgtgcccggcttgagacacttttcattgtcacaacttgagtaaagggttctacgttctactagcatctagcagataaaggccacggatgctgctaaatattctacaatgcataggacaaaccttacaacaaaaaattacccagagaagccctgtgttagacatacagcagtacttgtcagccataacttggtgcaaccttcacaaatctccaacttatgtctcttatctccaatgtatgtctctatcctaacatttgtctcattataatacaattatatttagatagctatcttccctaatagtactgtgaactcctaaaagcaaagtcagttaacctgcaacgtgacagcacctagcacagtgtggatgatcaacaaatgctgcatgaaaaagtgaacaggtagacaaatgaaaggttctcaattcaaactccagagtctagtaagatctggcccaaatgctgttcttctccatgaaggataatcagatttgagttttagaaacaatgctgaatttgacagctttagaacaggaggaaaacatgagagataaatctgttggactaaacctggagaggttaagaatgataaaattaagataatgaagtgaaataaggtttataactacaatagaaagaactgcataaaatatattttaaagaaaaaattaccaaggcttggggacttgacactactcctcaaaatcacctttatagatcctccttctgtacattaaaatgtatcttttaggctggtggctcacgcctgtaatcccagcactttgggaggccgaggcgggcagatcacctgaggttgggrgtttgagaccagcctgaccaacatggagaaatcccgtctctactaaaaatacaaaattagccaggcatggtggcgcatgcctgtaattccagctactcaggaggctgaggcaggagaatcgcttgaactcagaaggcggaggttgcagtgagccgagatcgcaccatttcactttagcctgggcaacaagagcraaactccgtctcaaaaaaaaaaaattgtcttttaacaatttatttcatgtaacacttttatgtaaagtttgacaatgtcctgatgtcatgatgtatatcagccatttccagaaaggtagcagggtactgaggagccatctgttcatggaacttctttctataccaaaaatatttttcattaggaaactatcagttaacatgaccctcaaaagttcataaaaaagtatgctaatccagaatgttaagtaggttaaagtgttttaaacgtctatattcaaaaggaagaaatatttacgttgaatatggcagctaagatttccccctttcttttagcaacagccatctcacagtataatgtaatccagttattttttggcaccatatcagaagcagttgcatttcaggaagatgaggtgtcagtgctgtagatttacctctgaaaagccttcagtgtaagtcaggacataaaaccacatagattgaaaagcacataaagtggctttaagagcaacttgatagtctcaggaacaacagtgaaagaaatgagttttctcctaatgaatactacaaaatactatgaaatactactgaagttactacagtgatttttttttcacaaggaaaaacagaaaaacactgaaaagtaaaggtttcatttaaccttaaagaaaccacagctttctgctagagatattcatcgtcaggagaaattagaaattgacttataactacatttatacatgttccattcttctgcagcattcaaaattttaaatacggatacagatgtaatgtttatcctcctagtgcaaagccaagattatagccagatggaaatcagctttatcacctcccaacatctggctctcaacacactgccaaagcaatatcactttaaatgtggaccgagaacccagagtcctagtgcaggctctaatgtagccctgtggtacgatctaaaagctatattggttgggtgcagtggctcacgcctataatcccaccactttgggaggccgaggcaggtggatcacctgaggtcaggagatcgagacaagcctggccaacacggtaaaaccctgtctctacaaaaacacaaaaaattagccgggtgtggtagcgggtgcctgtaatcccagctacttgggaggctgaggcaggaggatcccttgaacctgggaggcggaggttrtagtgagccgagatcacgccactacactccagcctgggcaacaagagtgaaactctgtctcaaataaataaatgccatattattgtcttcctgaataacagctacttgtaccataaacacatcaaggagattttaccatatgcattataataaagtacatttgaaaagtatagtcatgaaagtatatacttgacctatattttgaaaattcatggacaagtcctactttctagaaagaaaaagctcataaatgtagtactgtactaagccatagagtttactgggaaacctaggatgattacagaatcattctggcccttaacctggaagccacgcagagaaacttccagtaaaataccatgctgacactgcaggtgcctttaaagacacatttctaggaaagctgggcatttaacaggaagggaaaacaaggtaggaaagtactgtggatcttcccaactattaatagtatcatttttattaaaattggacagtctcaccccttttgttgttgctctaggtatatacccatcaccccctttcttacacatacacacacccatagacacatatacacacactgacatcctttcactgtacttctccatttaaatagtgttggacctagaggctgcgtgcgggctcacacctataatcccaacactctgggaggccgaggcaggtggatcacttgaggctaggagtttgagaccagcctggccaacatagtgaaatcctgtctctactgaaaataaaaaaatttagctgggcatggtggcatgctcttgtaatccaagctacactggaggctgaggcaggagaatcgcttgaaccaggggggcagaggttgcagtgagctgagatcgcaccactgcactccagcctgggtgacagagcaagactccgtctcaaaaaaaaaaaaaaaaaaaagtagtgttggacgtagcaaatcttcatatagcatgaaaatacaacatatgttttataagtggtcttcaaaatgttctatctgttgagataatctctttggataatgaggatcttactccttgtccagcattcccatcttcaaaagcatctcatgcacatgaatactacgtacttaccattctcaagtacaacatccacagccacagttgtcaggtctttagtacaagcagcctgaatgtcctcagttggggcaatgaatgtgctgagtccagtcattttgttgacataaaccattcttcccagggctacatcgaaatgccgctgccaatctgaacaacacgtgtttgactcttcagtttcagaacaagctcttgctttagattcctcactctgaaaacaaattccattttggtcacctgtggcatcttctaccggaytcattaacattccactgggagagtcaagacttcctatctgttgttctgaggctctgataagaacatctgaatctttacyggtaactttagaattattatagggcaataccaaaggagtttctgrtatcacacagttctctgttgtattgctgttagaatgtgttttactatttttattaaaggaattatcctgtgtggcagaatctgatgttgggatgacaccattctctgttttttcatgcttgttgttaaataacatacaaaaatcttgtgttaacacactgcacaacttgctgtctttcctactggaatctgaatttggaagttcattaaaacgactcatcatccccattgtttgagtttctctttcggaacccttcagtctggataatttagaggctagtgattcagatgacttctcaaggtccaaaggttttctattaaagagagataactccttcagggtcataggactttctctcaaactargcatctgttgttctaaacaatcttcatccttggagaatggaaacttctctgagtyaaggatgtggcttgctggttgacaacyactatctgaatcactatgctccatagtagtgattttacaaacatcagagttctctaagyggttcttgtccttcagcagaatgtcaggttcaacttgaagactgagattggtagtgactccattactttcctctacttctgtatccagaggattttcaaccttcccatattgcctcttaaacttctctaaagatcctagctgtgaactcaagcttagcttcttacggamgattggtttggagaaaccaattaatttatctgttttcctactatcattggaaaygtgtctayaccaggggaaagagggggatgtatcagataatatgcaatctgtttgtgattttttgctaccttcctgaaaagcagaaaacattgtataagttgctgtaggttcattctctagcccataacttatattcgttctgcaattttttttgttgggcaattgaccagattctttacttaaagtgctggctaaatctttgatgtctggagtttcaactgaatgacrtgttctatttccaaatgtttcttgggcacgtgtgggaccaggtctaacataatttttaaatgaatgttstgtttcagttgatttagttttttcattttgtactacatgagttataaagccagtggaacataatttaactygcccataactaaaaacatttcttcttccacaattgctagattctttttttttctctttctctgtctgagcactatgtactccccataatgttgttgcaaaaggcagaggctggcatcccacttcagtagcatctttaaatctctttggttgattctgaattctattatttttcaagatgttggcagccatgccattaacagtagtactttctttccatatttctagatcctgcccactctcctcaaagtgacatggtgtctgaaaagggcttaaaaacatttctaaactggttccacacggaytttctaaagagctatgttccaggaaagattttttatgtttctcattttctccagcttctgatgctacaattgtctcttgttctaacatctttgattctgagcaagagctgtctttgttttgtaaagatggctctgtcattttgctatggcctggaccacctgattcataaatgtacaaaaatgcatcatttgtattttttctggtagcttctgaatccctagaactctgtgtgtttacgttttctgcagtagtttttcttttcacagcttttgactgcaaattaaacatctcataggaatctaaaatattattacatgcttcctggaaattgctcctctcatcggaagtcacacgcttctgaagagtagcatcaaataaactaaaaccattatcttcactaaattccttaatatcctcacctgataattccacaaataatttttcttgctttaaaaacattttcactccttcctgaatgcaaaacaagagagtgtcccagttctgaaattcaatcagagttttggctggctccatgcacacatcatactcacagaattggcactgcacattaattacatatatgccatagagttctggggtagaccggtgccgaagacttgaattcatttgcctactggtgggaccattctttggcttgcatataatactttctttccttaataaaaagtcaatgagtttatgtagctttgtccttaaaactagtcttttgttcacaaacaaaaactgcatattcttgttgtaatgtgcttcagagctgatatagccactaagctcaaactcttkatatttaaaacttatttctcttagcttttgggactttcccaatccataaatttgacaaaatcgggaacatacgtctttggttttagggagctgaagaaccatggaaccagaaacatcatttctcaaagagaaagaaatggaagggtgcatgagtgagagagcttctattctctgcctaaccttctcaaactccagtctagggtccatgcatttcctccttacaggaagctggtaaaataggttatasactgttacagtagtcccagcgcttgctctagtcacatcagcttcacaagctttcagggcttttccactctgaaacagtttcacaaaagttttcattgtcctgtttttcttggacgaaatttccacagcactggccatgtcagcaatatttgccaaggcctctcctcggaaaccataaaaccttggattctccaagtcctgtaccgagtggcatttactggtgaaataacgatttcccactttctctacatcatcactccccatcccaaatccattgtctatcacttgaacttggaaggtttccatattcaccctgacagccacacattttgcttcagcatcaatactgttgagggcaagttcctcaacacattsgcccaaggagcttatggccaaaccagaacgcaatttggcttgtacttcaactgacaagcacytgatcatggtmggtagaaagatggtgagaatgccaggcactggtttccttctctgactggaaataattgcctattggagaaaaaaaccacacacgcacataatcaaagctttagcattacacagcattatgaagaaatagcacttgaggtaaatgaaatcactcttattaaaccaaattgtgaaacaaagcaaaacaaagttataccgctgatctctaggcacagctcatgcttggtgcaatggattaacatccaaaaaaaattcataatttcataattttcaatgctcctttctaaatcccacatgtcctaaagtgaaatcataattacacttgaagttgaccagtaaacacagtattcgaaattctaaccacttcaccaaaaacagatgcctaaattaaatacagctaaggaacattagctagaaattattcatgacaaaaatgtccaagctagtttcataacatttatacattacacaataaccatgacttttagaaaaatacttataatgaattgctaagacattgtaataaggtgaagcaataggaagaaattttaagaatcaaattgtatcaaagagagattgggggcattaagaggttattattattatggttaagtatagtcacctcagggaaagaggctgggaatgggaaaagataaagcaggaaaattccttttcatataaacctttctttgccatttgattgttaaatcctgttcatgtattactctgatgtttttagaaagtcgttattattcttttttgaaacagtctcactctgtcacccaggctggagtgcaatgacacaatctcggctcactgcagcctgcacctcccgggctcaagcaatcctccagccttagcctcccgagtagctgggattacaggcgctcgccaccatgcctggctaatttttgtctcttatgtagagatggggtttcaccatgttaaccagcctggtctcgaactcctgaactcaagtgatcctcccgccttggcctcccaaagtgctgggattacaggtgtgaaccaccgcgcccggccagaaggtcattattaatattcttttggtctttacagatgggcataaactaccttggtaataataatgatggcatggggctgcctgaacttgattttaagttttcctgcaagtgaaaacacaaaaacaaaaaacaaaacaaaaaaaaccaaaccctaagattccagtgccattaaaggtctccccttcttctccatcagtgagagccacgtgggtgggcccctgcaggcggtggggccggttttccaaactcgggacaaatcagggctcttaactgcagaatttctgctgctttctaagctaatgcactaagcagccggcagcaactgasgggtaaacgtttaacamgtattccgattaatgtaaacccaatgatttcctgatgacgcctcccagcgcctgggactgacgggacgcacgggcctggatccagggcacgggggcctgggagggccgcgcgggccgagtccggggcagcgctgccttcccgccaggcccagcccctccctggccagccccgtccttgtccccaaactgggcccgcccggccgccaggccgccgggcctccggggccctcgcgcatccggctccgaaagctgcgcgcagccatcatcagggcccttctggtgttagaagagaccccggcatcatcttttcgtcgcgtgcttcccccagagtcacctggagtcccgcttaacaaattctccgacaccaaccgcctcggacgccgacgcgcgcaccttggatcttgaggctcgtgcgtgcccacgagcatgcgcttcggagggggcgcgccaggccgcgagacaccagtgcgcatgcgcaccagttgttccagccaaggatccgcatcccagggttcagtgaaccggtacctacagtctcaatccttattcccttttggcatggtgttaaagactatgtcgtaacttttacttttgtttttatttttttttcccgtgttttccctttccttttttttctcattttcacctttgctcttaactaccgtttaattcaatatatattttatgtgtttacttattgtcttctctccctagaatgtaagctatgtgaaggtaaggagtttatatattttgtttactgctgtatcccagttaccaagaacagtgcctggcctatggtaggcaccgaatgaatgaataattccagagcctgccatcttagaattatggcatttggagctggaaaaggctgagaaactgtctaactcaactcttttttttttttttttttttttgagacggagtttagctcttgttgcccaggctggaattcagtggtgcgatctcagcttactgcaacctccgcctccagggttcaagtgattctcctgcctcagcctcccgagtagctaggattacaggcatgcgccaccacactcggctaattttgtatttttagtagagacgggggtttctccatgttggtcaggctggtctcgaactccggacctcaggtgatctgcccgcctcggcctcccaaagtgttgggattacaggcgtgagccaccgcacccggcctttgctcaactcttaatttacagatgacaacaccaagactctcttcactgacttgaatctccccagtgccaccacagcttttagttataaaaataactaaaggagagcagaactctgagaatgctgtgagaataaagtgttttggaattgttaaccagtccttagtttttgctttctatctcattttcattgagaatttaaagtggaatttataacgaatttgtcagacctggtaagcatttgatatatgctagtttagtgactaaccaaacccaaccaaccagtcttctagggctgattaagcaaaatcctgataactgtttatgattattactatacctagggctgccataacaaaatacctcagactgagtagcttaagcagcagaagtctatttcctctcagttctagagactggaagtctgagatcaaggtgttggcagcaacgatttctcctgaggcctctctccttggcttgtagatggccattttcacagggtctttgatttttgcacacgtgtctatagccaatatgttctcttataagaacaccagtcagattggattagggcccaccctcacagcctcatttaatcttaatcacctctttaaaggccctatgtccaaatacagtcactttctgaggtactggggactgagactttaacatatgaatttggtgggacacagttcagcccataacataactttatgtgaattccttacccagagaaaagaaacaacagcagaagtaattcatccaaacataaggtgaacagagctaacaaattgaacttgtggtatttgttcttattaggcatggaatttcttgaagaacatttcatagaaaccatttaaagaaatgactcagactttttttctttcagacctctttaaattacctcaaaatcctcttcctacaaatgtttactgaataaagacctctcatttcgcccaaaaggaagttcactgaagattttttaaaagtactctaagcagaaggttctaacgtttttattgattagatttgtgtacagtggtaatccttccatcatacaggtaatatataataacattcaaaaatctgacattaaaataacttattgactaatgctaacattaacacacaatagttctatctctattaataataaaaaccaaaccactgagtttatcttagaaaacttaaattcaggccattattttacaatttggaagtctgagtaatccaacttcaagatgactttttcattgttgaagtttgctttgtcgatgtgtgatttaggacttcctcttgtttcaagccattcctgcatatgacgcaccttggagatgggaccttgcaattgtccttgcactgtgccccggtcagtgttctggacccagcctaccaatcccagctttttaccctcagcctaaggggggtaaaaagagagagagatccagtgagattgaagaaaacaaggtaagactacaatctgttgccagaatcttggcctagaatcaagccactgaaactaatttgatattgcccagaacagtcaaaagaaagacagcaagaaggatctcattgcttatcttcacatgaagtattggccacttgactgcatgtctttcttctaccctataaaacccaggcactagaatttttcactgtgtagtcaatttggttaagtatcaaagacttaagtccaaaacagatgcttttgaaatgatcccctaaggctgattgtttttagaatactggactgtatcttgctcattttcccttcccctaatcaagaatctattgggtatgttaaatggaaaaaacatgaagttatctgatccttccctttgcctttaaccaggaccacacctaaacaaatccagatgaattagtgttcattatatctttaaagatcattagaaagtatttcacaatttcctgggcaactcatcccgttgttcttactgtagtgaaactgtctaacccaacatctttatgttgtagccaaagcccactttattatcttcctagaaaaggaaagcagctggtgttcagcctctcaacagcaaaccatgagactacataactatcaggttttcacttcactttcttctcttctgtctaaataatcacaatgcctttaggcttataaaaagcatctaatcattacagtgtcttatcctttttaatgttctttccttttattaaactgtggcaagactgaatgtttaggaaaggtagcaatgttttggaggtaattttatttttgtataaatttatgattagaatattaagtcattgattgttaaagtaattatctaaatagaagatgttggattacaaaagaaaatgggagttaacatgattgcatgtcaaaatgtgggaaattgctggagttggccaaagaaaacgttatgcatagcaacaaaatgtttgatgaggaatttaagtatccatcaaatcaaagacatgttcaaagcaaagacatgtttgcttaatgaacaaaacagactccagccaaataaataaccatttgagggatacaaaggaaattaaggaatgaagaaaaatagaagatgcctacctgatgcgctgctaagtgccaaagaagataccataaaagaagaatgctgagaatgaattttgagtaagactccgcatccaactgacagggcagtataacaactgccctcttctgcttcaaattaacccaggggagctgactatctccagttcttaagagttatcttatatggtaaatagctgtaagaatgtgcagttttaaacaggaggttgtcacagtcaaataaatctttaaaaatttgcaatgtgatttatctgaactcttttttttttttttttttttttttgagacggagtctcgctctgtcgcccagactggagtgcagtggcgtgatctcagctcactgcaagctccgcctcccaggtttatgccattctcctgcctcagcctccccagtagctgggaccacaggcgcccgcaaccactcccggctaatttttttgtatttttagtagagatggggtttcactgtgttagccaggatggtctcgatctcctgacctcatgatccgcctgcctcggcctcccaaagtgctgggattacaggcatgagccactgcacctggccttatctgaactcttgagagttgaacagaacactccaaaatttgaccagtgttgagaatgggcgtttcctactggtttcatttgtgtgctcaactctgttcttatttttttaatgatgacataatgttattgactcatgttcagttttgaatatctattgcaccaacagggtttttctcccctaagaaaattccaaaaagtgaattctacctcataaccatatttttgcttaaacaatcatctgacaacatttcaaggactgtaatcaccacctctagttgcaatctaaaaagaaactctcttcaaatcaataatcaagatttccaccttaggatactagaaaaagaagagcaaactgaattcaaaatgagcagaaagaaggaaataaagattagagcagaaattaatggaaagcagaagaatagagaaaatcaataaaacaaaagttgcttctttgacaggatcaacaaaattgacaacctttagctagactgataaagaaaaacggatgaaagcctcaaattactaaaatcagaaataaaaggagacattaccaccaaccttacaaagataaaaaggataaaagggaattctatgaacaattatatgccaaaaaattagattaaatttttttggatgaaaacaaacctaatacctagaaagacaaacaaccaaaactgaatcaagaagaaatagaaagtctgaatagacctataccaagagatggaatttgtaatcaaaaacttcccacagataaaaagcccaggaccagatggcttcatgggtaaattctaccaaatgtttaaaaaaaaatcctttaccaacccttcacaaactcttccaaaaaatagaagaagatccaaaccaagaattaagggttaaaaaaaagaagaggaaacacttcccaacacattttattaagccagcattatcctcatactaaaactaaagctaaaaaataaaaatgaaaaataagtgtctcattcctgggactgtggtacttaaaattcaaattctaacctggaaggaatctttgaaacatgaatgtgaattgtcaatacctcttttcctttttcttttttttttctgaaggatggtggcacagtcacagcttattgcagccttaacctcccaggctcaaatgatcctccttcctcagcctcccaaaaacaaagctgtcacgagaaaaaacaaccaaaaaaccatagaccaatatctcttatgaacagagatgcaaaaatcatcagcaaaatactagcaaaccaaatcaggcaacacagaaaaagaattgtataccatgacaaactaggatttctttcaaggttggttcaatatacaagaagtaatcaatttaatacaccatattaataaaacaaaagctatatgatcatctcaatagatggcaaaaaagcatttgacaaaaaccaatacctcttttatgatcaaaacactcaacaaactaggaacagaaggaaacttcctcaacctgataaagggaatctgtgaaaaacccactgctaacatcatacttaatggtgaaagattaaaaacgttcccacgaagatcaggaacaagacaaggatgtctgctgttaccactctactcaatattatacttgagggtctatccacagcaggagaaagaaaaggcattcagattggaaaggaaaaagcagaactacctctatttgtagatgacatatcttgtatacaaaaagtcctaagaaacatacacaggcacacactagagctaattaacagtctcacaaggttgtaggatataagattgatatacaaaaatcaattgtatttctatacactagcaatgaaaaactgaaaatgaaattaggaaacaattccatttataatagcatcaaaaagatagagtgtctaggaataaatttaacaaaagaattgcacgacatatatggaaatctacaaaacattcttgaaagaaattaaagagtatctaaataaatggaaagacatcccttactgatgtattgaaatacttaacattgttaagatgatattactacccaattgatctacagattcaactcaatct

SEQ ID NO: 97625 - DNA, 23965 bp, Homo sapiens
  misc_feature (1)...(23965): n = A,T,C or G
agtgatctggatcctatttccacttgtcttttcacctctctgtcctgccattttcttttctttttattttttatttttgagccagggtcttgctctgtcgcccaggctggagtgcagtggtgcgatcatagctgaccgcagcctccaactcctgggctcaaatgcacgtgcccgcacacacacacacacacacacacacacacacagagttggagaccagtgtgcccaaagtaacaggttgggaacagtgcacacacacacacacacacacacacacacacagagttggaggccagtgtgcccaaagtaacaggttgggaacagtgttcatgcagggtagtcatgacaaggacgttccattttgttctaagagccacaggtgggaaaaagagggtctgggccgggcacggtggctcacgcctgtaatcccagcactttgggaggccgaggtgggtggatcacaaggtcaggagtttgagactagcctggccaacatggcaaaaccccgtctctactaaaaatacaaaaattagccgggcatggtggtgggcgcctgtaatcccagctacttgggaggctgaggtaggagaatcacttgaaccgggaggcggaggttgcattgagccgagatcctgccactgcactccagcctgggcgacaagagcgagactctgtctgaaataaaaaaaataaaataaaaaaaaagaggatctgacccaagaaggtgtccactggcttcccctggctgcctgtagggaatagactggggacacaggtggaaacagggagagcagggtgggctcatggagaacaactgatgcaggaaaggtcagattcaggatcatcttgaagttggagccacagaaattgctgcatcgtgagatgtttctcatctcaggaaacatcaccaccattgactgcattgctcacgctgcagaccttgagtcccaggctgtctggcatcttggggaaaagcatggcctctggagccagctgcatggttccagattttaaaatcctacttctgatgcggcatggtggctcacacgtgtaatcccagtgctttgggatgccaaggtgggaggatcgcttgagcccaggagttcaagagcagcctcggcacagtcccagccactcaggaggctgaggtgggaggattgcttgaacctgggagttcgaggctgcagtgagccatgatcgtgccactgcactctagctggtgtaacagagtgagaccctgtctctaaaaacattaatgagttaatttaaatagttcattactcactactcaccagccagtgtgacccccttgggcaagtgcttaacctctctgtgccttagtttacccattggtaacacaaatagtaataggacctagctggtacggttgctgtgaggattctgtgagtaatgactccacaaatattagcttttatttccttcccacccaacatgcaatcaatccctcaccaagtcctgtgtgagttgttttttttccgccttggtggtttgggggttcgaacctgctgtgcctgggttctgatccctggttgagtcaatgggtggggcctgggagcctggatgagctccatcatgccttctcaccaggtattgacctgatggacatggcttcggacatcctgcagcccaaaggagatgatgtggcccggatcagctggtacctccgtgacatcatcactcgataccaggagaccttcaacgtcatcgagagggtgactctaggggtctggaggggatctttctccatacgcgcctcccctgggccagccctgaccccactcttcctgttccctctcagtgccccaagcccgtgattgctgccgtccatgggggctgcattggcggaggtgagtctgcggctatcctcctgctcgggtgctccccaggtggggctgctgctccgatgccgcggccactggcatccagcctcagctctgtcatgggccagactgtgtcccaagaggcagccccacctcccgggagccagggttggttctggtggtcattcagcatccctggcctctacctcctaggtgtggaccttgtcaccgcctgtgacatccggtactgtgcccaggatgctttcttccaggtgaaggtgagtcatcctcccgagctcctgcttagagctgggcagtggggtgaggttggggggcctggagtgagcctcgagggcttcatggaagagtcggagttgaacccgacaaagtaagacttgcccatagaggaagtcaagaggtgaagttgtgagtgggtaaggtatgaggtggggttgaggctggcaggtgtcagaggcagagattgctcctggggccatactggtgagggtgggaggcaggatggagccgggggatgcagtaaaggggtctcaggtagggtgaggagggttcctctctcacagatggagctgccctgagggaatgggagggtgcatgagtgggaaggtgggctctattctaggttgaaggaacttgcctgagtcaagaagctgcctgggcaatggaatgggactttggaggaagtcactggggtgaaggtggggcgggactctccagtagacatgaaatttcatggacgttgacattgcgaggggcacagtattgggcagaaaccaaacactgacccgattcctcccccaggaggtggacgtgggtttggctgccgatgtaggaacactgcagcgcctgcccaaggtcatcgggaaccagaggtgggtgcagggggtgtgggggtgtgggcaggagaccccagagcatctcccagccccggggtggcagccgcctcctgatgcacgcttgcctttgcagcctggtcaacgagctggccttcaccgcccgcaagatgatggctgacgaggccctgggcagtgggctggtcaggtagggccatggccgtggtagctcagtgctgggggcagccaggcctggagggttggaggcctctccgggtccccttgtctcctcgctctagaattcctagtggcatcctttcttggtgagctcatttctttattgtggggtcagccccctgctctgattgggctgtttctctggggtcttgggccttcctctgtgagtggccacttcttcatctgcgggaggctggaggagagagcccttcccagcccacccggtccctgatctctttcactgcagccgggtgttcccagacaaagaggtcatgctggatgctgccttagcgctggcggccgagatttccagcaagagccccgtggcggtgcagagcaccaaggtcaacctgctgtattcccgcgaccattcggtggccgagagcctcaactacgtggtaaggtgcacgctccgaccaatcacagccctcctctaaccccaggcgaccaaccagggtgcagggtgctcgcatgctttatcctgattggcccctgctaatctctctcctcgttctctctcaacaccctcggtaccaggcgtcctggaacatgagcatgctgcagacccaagacctcgtgaagtcggtccaggccacgactgagaacaaggaactgaaaaccgtcaccttctccaagctctgagagccctcgcgtcccaggccccagccagggggccggccttgtcccgcctcatccacagaaagggaggatgggcgatgacagttgtttctatgccttctgacccagtttcccagtttataactttatgacaatgagtttctcaagcccaaggccttatcttcaccccacaaacaataaagcaaagtaaagaacctggtgcccttcttggatagaggagaggtgggaggggctgggatgcacctaggggctccagagactgcagtcctgaaggctggggctagaggttggatgcatgggaatgggtggcatggaggtgatggccattcagactggcagcgggcaggcgaggggcacaaggaattccggggcggagggagtgagcaaaagtcgctggggtccctctgggttgcaaggcttcctggtctccctgcctgccctggggttgagggtggcgttcgtgccctgcctggcacctctcactgcacagcacatgggatctgatgctggcgtctcacacctgtaatcccagcacttttggaggctgacgcaggtggattgcctgagctcaggagtttgcaaccagcctagtcaacatgttgaaacccagtctctactaaaaatacaaaaattagctaggtgtggtggcaggtgcctctagtcccagctactcgggaggctgaggcaggagaatccttgaacccaggaggtgagtttgcagtgagctgagatcatgctgctgcagtccagcctgggtgacagagtgagactctgtctcaaaaaaagaaaaaacaaaacaaaaaaggactttggggtttctggccgggtgcagtggctcatgcctgtaattccagcactttgggaggttgaggcaggtggatcacttgaggtcaggagtttgagaccagcctggccaacatggcaaaacctggtctctactaaaaatacaaaaattagccaggcgtggagtaagcctgtaatcccagctattcagaaggctgaggcaggagaatcccttgaacctgggaggtggaggttgcagtgagctgagatggtgccactgcactgcagcctgggtgatagagcaagactctgtctcaaaaatgagcaaacaaaactttgggattttttatccatatatcatcccaatcttccggatttatgtttggaatgactgcaagaagaccaagcattaagttaatgacttctatatgctatgtcctgttctgagcatttattatcttaatgatcaaggactctatgaagttgatactattatgattattattattatgactattattgttgctatttttagagacggactcttagtctgtcacccaggctggagtgcagtggcatgatcatagctcactgtaaccttaactcctgggttcaagcgatcctcctgcctcagcctctgagtagctaggaatacagatgtgtgctaccatgcccagctaatttttattttatttttgtagagatgggggtctcactatgttgcccaggctggtcttgaactcctgggctcaagcagtcctcctgcttcagcttcccaaattgctgggattgtaggcacaagccaccacacccagcctaaggttgatactactcttttctttatttatttatttttctgagtggcagttggacccacagctagaacttatttggcagattaataacatacaggcattactggatcacaaattcatttttaaaatattttgatagctattcaatacttgtttcctctcttatgaattcctttttttttttttttttttgaaacagagtctccatctgtcatccaagctggagtgcagtggcgtgaccttggctcactgcactctcctccactcaggttcaagtgattctcctgcctcagcctccaagtagatgggattataggcacccaccaccatgcctggctaatttttgtatttttagtagagactgggattttgccaggctggtctcgaactcctgccctcaggtgatccatccacctcggccagtcaaagtgctgggattacaggcatgagccactgcacccagccgatactactatatccccattttacagatgagcacatgggcaaattgagggtaaggcactgacccatgatcatacagctgagaagtggcaaaggcaggatttgaacctagaacctctggctccacacactagtaatctaaaccactctccctacaatacaacatacgtggtaaagatgtgtggtgggcacgcaatcaacgtaggtcccttcacagttgctgggagaggcaggaatttgcagttcctccgcgttctcctcctccgctgcccacctgtcctgggtcattcctgcagcctgccctgccctgcctggtctcaccctccctctgccaacagaagtctgggcagggttttatgggctctgataaggccctggmagggccgaagttcatgagcacttcctctttgcaggagggcgtaggggaggggacccaggtgatttgggtcctggctggtcaccagggaagctggcaagggaagggagactagggtgcgctctaggagaagccgacagcctgagagtcccagaagaggagccctgtggaccctcccctgccagccactcccttaccctgggtataagagccaccaccgcctgccatccgccaccatctcccactcctgcagctcttctcacaggaccagccactagcgcagcctcgagckatggcctatgtccccgcaccgggctaccagcccacctacaacccggtgagatgccagctcaggccccactccgcccgcagctccgtccataagccctcacaccaattttccccactctgatcctggggggccccatctgactctgwggtctgatttacccaaagctgaccccgaccctcgatttactcctaccctgacctcaggctgtctgtgtccacgtctaactgttggccctcgtcatcttcaacctggtcctcccccatggtttcctctctcctgcttaagggactggggggcttttctgggaggggtaaaggctgcaacaggcagatggcttgtgagtcccctcaccaggcctcttctccagaygctgccttactaccagcccatcccgggcgggctcaacgtgggaatgtctgtttacatccaaggagtggccagcgagcacatgaagcggtaagaccctccccaagccaggccgggctggcaggggacttccaactgggtgctctgggcctggctgttgggggctttctgcccttaccccaccctggtggagaggggactctttttctgccccacccaatagccagagatgaatctggggcagatcaggagtggggacgtgggggccagaaggttcagggagggctcaccgtgagaggcagtccctgagttggacaytagactgaagctgatgggtgcaatggcaggaattcagatcacaggctcagagccgggtccccgagttaaaatcccagctctgccactccccagctctgtgttggtgaaagagtgaaagtgactatacctctctgtgcttcattttcttttcttttctgtttttgttttttttgtttttttttttgttttgagatggagttttgctcttgtcgcccaggctggagtgcaatggcatgatcttggctcactgcaacctctgtctcccaggttcaagcgattctcctgcctcagcctcttgagtagctgggattacaggcatgtgccagcacactggctaatttttgtatttttagtagagatggggtttcaccatgttggtcaggctggtctcgaactcctgacctcaagtgatcctcccatctcggcctcccaaagtgctgggattacaggcgtgagccactgcgcctggcccagtcttagctttttaaaaagggccttaacacgttgataatgattggcctcataggactttttttttccttagagatagggtcttgctctgttgcccaagctggagtgcagtggcacaatattatagctcacttcggcctccaactcctgggctaaagtgatcctcctacctcatctttccaagcagatgggactacagacatgtgccaccatgcccaactaatttaatttttaatttttatttattattattatttgttttgtagagacaaagtcttgttatgttgcccaggctggtcttgaactcctgtgctcaagcgatcctctagcctcggcctcctaaagtgctgggaggatcaggcactggtatgagccactctgcccagcctgttgtttatttatttattgtttacttcttcactgagtgcctattctgtgtcctggcactagggatggaggagtgaacaggacagagacccctgccctcgtggagctgatgtcctagtaggggaaacataaaaaataagtccaggccgggcgcggtagctcaggcctgtaatcccagcactttaggaggcctaggcaggcagatcacctgagatcgggagttcaagaccagcctgaccaaaatggagaaaccctgtctctactaaaaatacaaaattaccagggcgtggtggcgcatgcctgtaatcccagctactcaggaggctgaggcaggagaatcacttgaacctgggaagtggaggtttcggtgagccgagatcgtgccattgcactacagcctgggcaacaagagtgagactctgtctcaaaaaaaaaaaaaaaaaaagtcaaatatgtaagatgtcagatgatattaagtgctatgaagaaaatgaggagggaagggagatggggagtgtatgtgcggacagaggttccctttaaattgtccccttaaatagggtggcctggccgggcatggtggcttacgcctgtaatcccagcactttgggtggctaagccaggcagatcacctgaggtcaggagctcgagactagcctggccaaaatggcaaaatcgcatctggctgggcgtggtggctcacgtctgtaatcccagcactttgggaggcagagacgggcggatcacgaggtcaggagatcgagaccatcctggctaacacagtgaaaccccgtctctactaaaaatacaaaaaattagctgggcatggtggcgggtgcctgtagtcccagctactcgggaggctgaggcaggagaatggcgtgaaaccaggaggcggagcttgcagtgagccaagattgcgccactgcactccagcctgggcgaaagagcgagactccatctcaaaaaaaaaaaaaaaaaaaaaaaaaaggcgaaatctcatctctgctgaaaatacaaaattagccaggcatggtgacaggtgcctgtaatcccagctacttgagagcctgatgtgggagaatcacttgaatcctgaaggcagagtttgcagtgagctgagatcgcatcactgcactccagcctaggtgacaaagggagactgtctcaaaaaaattaaaaaggtggccagagaaggcctgcctgggaagggaacatatcagcaaagaacagaaggaacggagagagggatccccagggacagctgagggaagggccttccaggcagagggaacagccagtgcaaaggccctgagacaggcctgtcctggggagtaatttcaaggatgctggtgtgcccaggggtgcggaatatgatgcgtcatgggtgtacacagggaccctctggctgcatgagggaaatgatcttcagggccaggaggggagcagggagacccaaagtgcataggacagggcctggcccgtggcagacttgtaacagtcataactggaagttgggaagagggtggaggaggtggtctaagaaggcaaggtgggctgggtacagcaactcacacctgtaatcccagcactctgagaggccgaggtggtaggattgcttgagcccgggagtttgagaccagcctsggcaacatagtgagaccccatctctacaaaaaaaaaaaaaaaaaaaaaaaagccaggcatagtggcatgcacctgtagtcccagctactagggaggctgaggcaggagaatcagttgacccaggaggttgaggctgcagtgagccaccatcgtggccactgtactccagcctgggggacagggtgagaacacaagaccctgtctcaagaaaaaaaatgtcaggcacggtgtctcacacctgtaatcccagcactttgggaagccgaggcaggtggatcacctgaggtcaggagtttgagatcagcctggccaacatggtgaaaccctgtctctactaaaaatacaaaaattagccggacgtggtggtgcacgcctgtaatcccagctacttgggaggctgaggcaggagaatcactggaatccaggaggcggaggttgcagtgagctgagatcgcggcactccaactccagcctgggcaacagagcaagactccatctcaaaaaaaaaaaaaaaaaaaaaaagaaggaaaggctgtgagcgaaggtgtggtggtgggaatctgcccccctcagaactcaggtcctctccacgctgtggcccacagtgccaaggttgcccctcagagctggtgctgaggtccgggccagggaggccsaggacagggcggcagggagagggcttcctggaggaggcccccaggccccgggaggtggcaccaggggaatgagccctttgtgtcccgccaggttcttcgtgaactttgtggttgggcaggatccgggctcagacgtcgccttccacttcaatccgcggtttgacggctgggacaaggtggtcttcaacacgttgcagggcgggaagtggggcagcgaggagaggaagaggagcatgcccttcaaaaagggtgccgcctttgagctggtcttcatagtcctggctgagcactacaaggtctgcatgctttctctcttgyttcccaagctggagtgcagtggcgccatcttggctgcttccttccttcccgccttccttccttttctttctttctttctttyttttttttttttttttgagatggagtttcactctgttgcccaggctggagtgcagtggcatgatctcagctyactgcaacctctgcctgctgggttcaagagcttctcctgcctcagcctcccgagtagctgggattataggcgcgtgccaccacgctcagctaatttctgtattttgagtagagatggggtttcaccatgttgcccaggctggcctcgaactcccgacctcaggtgttctgccctccttggcctcccaaagtgctggaattacaggcgtgagccaccacrcccagccccttccttctttttcctctttttccttcctctttctctgttctctcctctttcctcccctccttccttcccccttccctcctctcttcttccttctctctccttccctccttcatttatttcctttttccatccccactttttatgtcaacttctttcttttcttttccttctttcctgcctattttattttattttattatttatttatttatttatttttatttattgatcattcttgggtgtttctcagagagggggatgtggcagggtcataggataatagtggagagaaggtcagcagataaacacgtgaacaaaggtctctggttttcctaggcagagggccctgcggccttccacagtgtttgtgtccctgggtacttgagattagggagtggtgatgactcttaaggagcatgctgccttcaagcctctgtttaacaaagcacatcctgcacagcccttaatccatttaaccctgagttgacacaccacatgtctcagggaacacagggtaaggttacagattaacagcaactcaaggcagaagaatttttcttagtacrgaacaaaatggagtcttctatgtctacttctttctacacagacacagtaacaatctgatctctctttcttttccccacatttcccccttttcttttcgacaaaaccgccatcgtcatcatggcccattcttgatggtcgctgtctcttcggagctgttgggtacacttcccagacagggcggcctggcagaggcgctcctcacttcccagacggggcggccgggcagaggcgctcctcacctcccagacgaagggcggccgtttcctgcctattttyaaaaatcctcttttagcgcttttccttagtcccattaccctactgctgagagtcttgtaatacatttcatgtgtatttcctcctaccactttgtgttttttgcaaaacgtgtactttttgttttcctcttgagactgggtctcgctctgttgcccaggctggagtgcagtgatgcaaacagctcactacagcctcaacctccccgggctcaggtgatcctctcacattagcctccggagtagctgggactctaggtgcacaccaccacgcccggctaatttttgtatatttttgtaaagacggggtcttgctatgtttctcaagctggtctcgaactcttgatctcaaatgatcccccaccttggcttcctaaagtgctgggattacaggcatgagccactgcgcccggccagtgagctgatttttgaccttagcttgacctctgagctgtggactccaaggttcctgatgctgaggctgtcccagctcatccccaagactatcgactcccaatgaaaaagatccctgatccttgcttttttttttttttgagacagagtcttgctctgtcacccaagctggagtgcagcagcgtgatctccactcactgcaacctccacctcccgggttcaggcgattctcctgcctcagcctcctgagtatctgggattacaggagcccgccaccatgcctggctaatttttgtatttttagtagagatggggtttcactatgttggccagactggtctcacactcctgatctcaaatgatccacccccctcagcctcccaaagtgctgggattagaggcgtgagccagggtgccctgcccttgcttcctgtttgtaccttcccaggatcatgggtgctgactcctgacctcccatctctgccctccaggtggtggtaaatggaaatcccttctatgagtacgggcaccggcttcccctacagatggtcacccacctgcaagtggatggggatctgcaacttcaatcaatcaacttcatcggaggccagcccctccggccccaggtgtgaggggtcccatcccttcttgcgtcctttctttctaaattcagttccacattcattttttttctttttttctttttttcttttttttttgagacggagtctcactctgtcgcccaggttggagtgcagtggcgcgatcttggctcactgcaagctccgcctcccaggttcacgccattctcctgcctcagcctcccaaatagctgggactacaggagcctgccaccacgcccggctaatttttttgtatttttagtagagacagggtttcactgtgttagccaagatggtctcgatctccttacctcatgatccacccacctcgacttcccaaagtgctgggattacaggcgtgagccaccgcagttggtctattttttctttttgagatggagtcttgctctgtctcccaggctggagtacagtggtgtgattctggctcactgcaacctctgcctcccagttttaagcaattctcctgcctcagcctcccaagtagctgggattacaggcacccaccatcacatctggctaatttttgtatttttagtagagacggggtttcaccannnnnnnnnnnnnnnnnnnnnnnnnnnnnnnnnnnnnnnnnnnnnnnnnnnnnnnnnnnnnnnnnnnnnnnnnnnnnnnnnnnnnnnnnnnnnnnnnnnnnnnnnnnnnnnnnnnnnnnnnnnnnnnnnnnnnnnnnnnnnnnnnnnnnnnnnnnnnnnnnnnnnnnnnnnnnnnnnnnnnnnnnnnnnnnnnnnnnnnnnnnnnnnnnnnnnnnnnnnnnnnnnnnnnnnnnnnnnnnnnnnnnnnnnnnnnnnnnnnnnnnnnnnnnnnnnnnnnnnnnnnnnnnnnnnnnnnnnnnnnnnnnnnnnnnnnnnnnnnnnnnnnnnnnnnnnnnnnnnnnnnnnnnnnnnnnnnnnnnnnnnnnnnnnnnnnnnnnnnnnnnnnnnnnnnnnnnnnnnnnnnnnnnnnnnnnnnnnnnnnnnnnnnnnnnnnnnnnnnnnnnnnnnnnnnnnnnnnnnnnnnnnnnnnnnnnnnnnnnnnnnnnnnnnnnnnnnnnnnnnnnnnnnnnnnnnnnnnnnnnnnnnnnnnnnnnnnnnnnnngtgtgagccatggtgcccagcgcattccacattcatttatttcccaagcatctccctctgctgagttatgccaagagcccagtgatgatcaagggatcccactgggaagacagacccatcactgcaagggatcaaggccgggatggggaggcccaggctgaagggttgcagttgggtttgggcccagacagagggatcagggccaggacaggagggtgggtggaggcaggcagaggggtcaggcccagggctggagacaggaatgactgagatatctctgggccctgacctcactgggctcacagacatggcatcagagagtgacagcccagaaatggtcaggtctgtgatagggagggcacaggcagaggggcaggggctgggatatggagtatacaggaggtttgggagcctacaggaagggcttgactagtcatgggtcaggaaggaagtgcttcctggagtaggaggaagtgtgtaaggtgagtcagaaagtgaggataaggaaaggcaaagaacacacgatagtgaatgaattccctagaggttgcttaacacaatcattaaaaataaataacatacaattaaattgagtttatcaatattattattattattattattattattattattattattaatttttgaggcagggtctggctctgtcacccaggctggagtgtggtggtgcaatcacagcctactgtattcttgacttcctgggttcaagtgatcctcccacctcagtctcctgagtagctgggactacaggcacgcaccaccagccccagctagtttttaaattttttgtaaagacagaggggaggaattttcctatgttgtccaggctggtcttgaactcctgwcctcaggtgatccacccacctcagcctcccaaagtcctgagattacaggcgtgagccacagcccccggcttataaagctacgtttatttgtttgtttgttttttgttttttgttttttttttagatggagtcttgctctgtggcccaggttggagtgcagtggcatgatctcagctcactgcaccctctgcctcccaggtttaaggaattcttcctcagcctcccaagtagctgtgattacaggcacctgccaccacgcccggctatataaagctacttttaaaaggccttcagaatagctggctgagaatagaagtcaaggcagaatggagttaattacaaggaggagaaaagagaaggtaacagagagaaagagagagagtaaaagttaaaggtgttagacttgggagggtgaggcgagcggatcacctgaggtcgggwgtwtgagaccagcctgaccaacatggagaaaccccatctctattaaaaatacaaaattagctgggcgtggtggcgcatgcttgtaatcccagctacaccggaggctgaggcaggagaatcacttgaacccaggaggcagaggttgaggtgagcagagatcgtgccactgcacggcaccctgggcaacaagagcgaaattccatctcaaataaataaataaaagtgtttggcagaaggaagcccctgcgctgaggtgtggccaagacagagagagaggcagagacacagggacagaggcagaaactgagatcaagatcagcgagtgagggccccgggacagcaggaagacagcaaggggaagggcacagagaacgaaatggaccaagcattgtcctaaagctttggggtgactcactgggcatcagcgatcccagaacatggggtgcccctctccgtgaatctgtgatcggggtgccaccctttgatgccagagttctctggcatagtggtggtggtggtgggccaccccagggcaggcactctcgacatctttcagtcgcaaatctggggaccctctcataaccgctttctctttctgtgcccacagggacccccgatgatgccaccttaccctgtaagtacttgctgataggtgagggtcttcctccctagtgggktccctcagcccctctcacccttcctgccttctgtccatcgttcagggtcccggacattgccatcaacagctgaacagcctgcccgtgagtgggagggctgggagggccccgggtgaggagtgggaatggtgagaattggggtagggggagctaagaggggttgcagcccaaggtgtactaacccagcacctagagaaacgccggagtctaatgggtgtgtcatagatatctgtcgactcttggagaataatatcrcttcttcctcacttcacagaccatggaaggacccccaaccttcaacccggtatggcttggggaaacagagatggatggtggggagggggcacggatctccagggaatctgagacagccagaaagggagtgggctgagggttttggggtgggaggtaggggaagggtagatagagttcgtggtcaggtttagggagcagaaggaattggggatgttttccaggaggagtgggacctctcagaaaatttgttcttgggctggacatggtggctcacgcctgtaatcccagcactttgggatgccaaggcggacagatcacgaggtcaggagatcgatcgagaccatcctggccagcatagtgaaactctgtctctactaaaaatacaaaaattagctgggcatggtggcgcgcgcctgtaatcccagctactcaggaagctgaggcaggagaatcgcttgaaccagggagtcggaggttgcagtgagccgggatcgtgccacagtactccaacctggtgacagaacgagactccatctccgaaaaaaaaaaaaaaaaaaaaaaagaaaaagaaaatttattcttggccagacacggtggctcatgcctataatcccagccctttgggaggccaaggcaggtggatcacttgaggtcaagagttccagatcagcctggtcaacatgatgaatccccgtctctactaaaatgacaaaagttagccaggtgtggtggcgcacacctgtaatcccagctactaggaaggctgaggcagcagaattgcttgaacctaggaggcagaggttgcagtgagctgagattatgccactacactccagcctgggcgtcagagggagactctgcctaaaaaaaaaaacaaaatttgttcctttgttcctgcaaggctkggcgtggtggctcacgcctgtaatcccagcacttcgggaggctgagatgggaggattgcttgagcccagcagtttgaggctgcagtgaggcttgatcatgccactgcactccagcctgggtgacagagtaagaccccatctcttataagaaaaaaagacaggaaagaaaagaaaagaaaaagaaaatttcttcccacatctggctctgctaagctgagagagaatgggaccccccgttctcttcccacagcctgtgccatatttcgggaggctgcaaggagggctcacagctcgaagaaccatcatcatcaagggctatgtgcctcccacaggcaagaggtataacgtaaactaggtgggaacccccagccccctcctccctcagacccaacaatctagaccctctgtcccctcctcctttagggattcagaggtccagcccactggcctcttcccactggactccatctgactcccccatycctctctgtccccagctttgctatcaacttcaaggtgggctcctcaggggacatagctctgcacattaatccccgcatgggcaacggtaccgtsgtccggaacagccttctgaatggctcgtggggatccgaggagaagaagatcacccacaacccatttggtcccggacagttctttgatgtgagtctgagctctcttttcccacttccttccagggcctcagtcctggccctggcctcatgyccacccttctccctgcagctgtccattcgctgtggcttggatcgcttcaaggtttacgccaatggccagcacctctttgactttgcccatcgcctctcggccttccagagggtggacacattggaaatccagggtgatgtcaccttgtcctatgtccagatctaatctattcctggggccataactcatgggaaaacagaatyatcccctaggactcctttctaagcccctaataaaatgtctgagggtgtctcatgagtgtgtgtctccatctgctccccggctactcttcccttccttggttcagtcatgcacttcatctatccttcatccatccagtcatctgaccatccatcctcctgtcatcataaatctggttatgccccaagcactgatttagggctcattcacttctcacagcaaccccaagaggtagaaacaattattatcatccctctgtaacagatgaggaaacaaaggaaaataaaacaaattgcccaaattatacattgcataaatggcagaaggaggattcaaatccagctgatctggctcccaaggatctgcacacttaaccactatacagcctgtcgttccatccatccatgcatccatctctccactcgtgtatcccaacatccatcaatctctccatgtatccaaccaaaagtccatccaaccatccatcaatcaaacatccaaccatctagacctcatcaatccatccattgagctgattgttcaaccatcctttcatccaaccctttatccatctacccatccatttacctctgcacccatcatctcatcgtcaatctctccaaacatccagtcaaccatatgttcacccattcatccaaacatgcaactattcatctactcaccagtctgtctagctctatccagctgtttatccatccattctttcattcaaccttttatccatcacccatgcatctgatcatccatcatcttctccatccatccaaacatctaaccatataccagtctatctgtctattcattcagccatccttacgaagtctaactttcgtccatccattcatttattcatccctccatttgtccatgtaattctctgctttccatcacagtcatccatttgtcctccatatgcccattcatccctccattcagcaattcatcacttttccatctctttctatccaattatccattcatctcttcattatctatttttttccaacccttttccaactcaagctggaaagttatccattcatttatattttcttctctccatctgtccacccaaccatgctttcatcaaatcactcttttgctgatttcatcattcattgatttcttgtttttatttttatttattttttttttgagacagagttttgctcttgtcatccaggctggagtgcaatggtgctgtctcaggtcactgcaactgccatctcccgttcaagcaattctcctgcctcagcctcctgagtagctggaattacaggcacccaccaccacgcccagctaatttttgtatttttagtagagacagggttttgccatgttggccaggctggtcttgaactcctgacctcaggtggtgcgcctgcctccgcctcccaaagtgctgggattacaggcgtgggccaccgtgcctggcccattcattgatttctttcttttttttctttctttttttgagacggagtcttgctctgtcgccaggctggagtgcagtggtgccatctcagctcactgcaacctccgcctcatgggttcaagtgattctcctgcttcagcctcctgagtagctggggctacaggcatgcgccaccatgcccagctaatttttgtatttttagtagaaacagggtttcaccatgttggccaggatggtctcaatctcttgactcgtgatacacccaccttggcctcccaaagtgctgggattacaggcgtgagccactgcccccagctgatttctttacattttcattcatccatctattctttattcactctcgtgtttacttattcaccagtcactgactcatccactttcaaattagctgggttggctttctgatgtaatgggttagcaagcttcaggacaaaccatgaagtgacgaattaaaccctctatattattaattggataaaatgctgtaaaaccggttattagcatgactcaaactaagtttaaatgtttgcatgtctaaagcaactttctggagtgatggatatgttccataccctaggtcacacagctctgtgcatttgttagaactcattggctgtatattttattttattaaattctttttatttttgtttttattgagacaggatctcactctattgcccaggctggagtgcagtggtgtgatcacagctcattgcaggctcaacctctgggactcaagtgatcctcccactccagcctcccaggtagctgggaccacaggtgtgcaccaccatgcccagctaattaaaaatatatatatttataaagacgggggtctccttatgttgctcaggctgatctcgactccctgggctcaagcaatgctcctgccctagccgcccaaagtgtcgggattaccggcgtgagtcgctgtgcccagccaactgtacattttagatttgtgcatttcaccaatataaacaaagaatctttccgcaaagcttaccacaaggaaagaatcataaacaaatattgtactctagctaatgatgtacttctgaaatgtttaggggtgacaaatactgatgtttacaatttacttcgaatggataagtaaataaaatgatggctgggtgcgatggcatgagcctgtaatcccagcactttgggagacgaggtgggaagattgcttgagcccaggagttcaagaccagcctgggcaacatggcgagaccctgtctctacaaaaaataaaaaagtaagccagatgtagcaaacatctgtagttccagctgctagggaggctgaggcaggaggttggcttgtgcccaggagttcaacgctgccgtgaaccataatcaggccactgcactctagtctggacaacagagcaaaactctgtttctaaaaaaatacaaaatagctccctccccctccccctccccctctccctctcctctttccacggtctccctctggactgtgctgctgccatctcggctcactgcaacctccctgcctgattctcctgcctcagcctgccgagtgcctgcgattgcaggcgcgcgccgccacgcctgactggttttcgtatttttttggtggagacggggtttcgctgtgttggccgggctggtctccagctcctaaccgcgagtgatccgccagcctcggcctcccgaggtgccgggattgcagacggagtctcgttaactcagtgctcaatggtgcccaggctggagtgcagtggcgtgatctcagctacaacctccacctcccagccgcctgccttggcctcccaaagtgccaagagtgcagcctctgcccggccgctaccccgtctgggaagtgaggtgcgtctctgcctggccgcccatcatctgggatgtgaggagcccctctgcctggctgcccagtctggaaagtgaggagcgtctctgcccggccgccatctcacctaggaagtgaggagcgcctcttcccggccaccatcccatctaggaagtgaggagcgtctctgcccggccgcccatcgtctgagatgtggggagcgcctctgccccgccgccccgtctgggaggtgaggagcgtctctgcccggccgccccgtctgagaagggaggagaccctccgcctggcaaccgccccatctgagaagtgaggagcccctccgcccggctgccaccctgtctgggaagtgaggagcgtctccgcccggcagccaccccgtccggaagggaggtgggggggtcagccccccgcccggccagccgccccggccagccaccccgtctgggaggtgaggggcgcctctgcccggccgcccctactgggaagtgaggagcccctctgcccggccagccgccccgtccgggagggaggtgggggagtcagccccctgcccagccagccgccccgtccgggagggaggtgggggggtcagccccccgccaggcgagacgccccgtccgggagggaggtggggggtcagccccctgcccggccagccgcccggtccgggaggtgaggggcgcctctgcccggccgcccctactgggaagtgaggagcccctctgcccggccaccaccccgtctgggaggtgtacccaacagctcattgagaacgggccatgatgacaatggcagttttgtggaatagaaaagggggaaaggtggggaaaagattgagaaatcggatggttgctgtgtctgtgtagaaagaagtagacatgggagacttttcattttgttctgtactaagaaaaattcttctgccttgggatcctgttgatctatgaccttacccccaaccctgtgctctctgaaacatgtgctgtgtccactcagggttaaatggattaagggcggtgcaagatgtgctttgttaaacagatgcttgaaggcagcatgctcgttaagagtcatcaccattccctaatctcaagtacccagggacacacacactctgcctaggaaaaccagagacctttgttcacttgtttatctgctgaccttccctccactattgtcctgtgaccctgccaaatcccccctctgcgagaaacacccaagaatgatcaataaaaaaaaaatacaaaaatacaaaaatacaaaatattaaaataaaataaagaaatagtgctcgcttcagcagcacatatactaaaatctggaatgatgcagagaagattagcatggcccctgcgcaaggatgacatgcaaatttgtgaagtgttccatattttttggccaggtgtggtggctcacgcatgtaatcccaacactttgggaggccgaggcaggcgaatcacaaggtcaggaatttttgagactagcctggccaacgtggtgaaactctgtctctaccaaaaatacaaaaaattagccgggcatagtggtgggtgcctgtaatcccagctactcgggaggctggggcaggagaatcgcttgaacctgggaggcagaggttgcagtgagccgagatcgcgccactgcactccagcctggcaacagagtgagactcctctcaaaaaaaaaaaaaaaaagaagaagaagaaaagaaaaaaagaagatggtgatggatggatagaagggtggatagatggatctatgtgtgataaagcaagttgagtaaaatgttatatagaatctggttagggtatatgaggtattcatagaataattcttttaacttttctgcatgtctgaaaaaattcataataaaatgttgggggaaacctttgcatacaaactttgcaaacattgtatcatacaatgatatgaactgtaaattttttaggagttagaatggtaatgaggttttgtttaaaaagagagcctgccaggcgtggtggcagatgcctgtaatcctagctacttgggaggctaaggtgggaagactgtttgaacctgggagtttgagaccagcctgggcagcatagtgagaccccatctcaaaaataaaaattaaaaaataaatatcatttagaattatacacatatttatggataagattatataacaccttttaaaaatccaatttaaaatgggcagaaaatttcgataaacatttctgcaaagaagatatataaacggcaacccatgtcattagggaaatgcaaatcaaaaccacatgacatatctcttcaccaagtggtgaagccaacctattaggatggctataataaaaaagacagataggtcaggtgtggtggctcatgcctgtaatcccagcactttgggaggccggggtgggaggatcacttgaggctaagagttcaggaccagcctgggcaacatagcaagaacctgtctctacaaaaaatttttaaaaattagccaagcatggggacgcacacctatagttccaactaattgggaggcctgaggtaggagaattgcttgagcccaggaggtggaggctgcagtgagccatgatttcaccactgcactccagcctacacaacagaacaagaccctgtctcaaaaaaaaaaaaaagacaataacaagtgttggagagaacatggagaaataggaacacatatgttgctgatggtaatgtaaaatgttacagtta

SEQ ID NO: 97626 - DNA, 27950 bp, Homo sapiens
tttctgaatgactgttgctggagcctcaggcctgctttgtgcttggtgctttccagactttctcctttattcctatcaccatatacgtactcacaaaagagcagtgtaaaccaggtattacatttccacaagggaaagtagaaccaggaatagccacatgatacttaccgaaagcttcactttccctatagagaaagcaagcaacatgaatcttctgatttggggcccagcctgctgctgtatacagaggttggcattattggtgatagaaatgtctgataggagtcttttaattatactctggagtgtggaggtggagtgcaaggctgcttcctttattactgcaagtgttattttctattatctcaggtttcgttttgtgtaataaactgcttcttgttaaacaatgtcttctgcttcattatttttttgggggtgggtgtaataaagttggagatttgtaaaaaagtttcaggttgggtgtggtggctcatgcctgtaatccctgcactttgggaggccaaggagggaagctcacgtgagcccaggagttcaagagtagtctgcgcaacatactgagaccccatctctacaaaaaataaaaccaagccagccgggtttggtggtgtgagcctgtggtcgcagctactccagcagctgaggcaggaggatcactggagtgaggccaaggctgcagtgagctaatattccactgcactccaacctgggtgacagaacaagaccccaaatccaaaaataaataaataaataaaacatttgctcatttaacaagtatttattggtactattctaggcactggggattcagcaatgaacaagatagacaacgttccttctttcatgcttacatttttaaatgggtgttagggataggtaaggccataataagacaattcagactgtgataggtgctatggagaaaacaggttgatggtggtgaggtgtgagaggtcagggaagccctctgtgacatgaactgagacttaagggaagaaaaataagcagccatgcagaaatcagtgggaagattccaaacatctgtgataagtgatttttttaacacactaaatttacaaatccaaatgttcttcctccaaagtagtcatgagctacaggcttgttttctgcttccattaccaaaaacatttcttggagcttatttggaaatgctttgagaatatgctgcacatctttggaatgagttgtgaaaatggccagaagaagtcacttgagaaacaagtctggctgggcgcggaggctcagtcatgtaaagcactttgggagggcgaggcaggaagatcgcttgaacccaggagttcgagaccagcccgggcaacatgacaaaaccccgtctctacaaaaaataattagctgggcgtggtgtcttgcacctgtgttctcagctactcaggaggcagaggcgggaggatcgtttgagttcaggagtttaaagctgcagtgagctatgaacgtgccacttgcactccagtctgggcaaccaagagagaccctatctcaaaaaaaattctgattaagcatcacaactgaaggtccaagtctgtaagactggcgagaggactgaaaaagacgatgaatgccaagtgtttaagcttcatcctaccaactgagattgttataaatgagcaaacggtatctaactagtagcagtagtagcagttgttgttgttataaaatgaaacaagtctaatttttctttgcggctttgtagtggtcctataggcagtgaaaaacgacagttctttcaggtttattaaagtaaaacacgaatctttcccaacccaacatcttaaagtctcaaattttgattcgccacccccccccccaaccccgccctatgccaatcgcccctagaccaagccggctaccaccagaacagtgtccacttaccagggccctttcctgcatgtccccggccccgtactgcccccagacttcggggcccggagcccatcaaggagaagcctcagtcggcgtacgaacccagagtctcctcctaatctgctgacaagtatgaacccgccgctgttcgaacccagcgtcgccgcagccccggccaagtaaaagaaagaggtggctgccagcaagccaacgagccttccccgagctccgcgccgattcgtccagcccgtaggggtcacgcgaggtcacgcacggaaccgcaaagcctgccgggagcttggtgcgctatggcgacacccagcctgcggggtcgtctggcgcggtttgggaacccgcggaagcctgtgctgaagcccaataaacctctcattctagctaaccgcgtcggggagcggcgccgggagaagggcggtgagcagtcggagtcaggacggccccggagcggaagccggagcatgagcaggggcgggtgggtaggagggcaggaaggtgggtcttcttgtgactgaaggtcccccggatctgcccctccagaggcgacttgcatcacggagatgtcggtgatgatggcttgctggaagcagaatgaattccgcgacgatgcgtgcagaaaagagatccagggcttcctcgattgtgccgcgagggctcaggtgaccgatggctcctggggtgctttctcaggaaaagaatgggggagatagaagtaatgattctccctgccttttgctaggaaaggccctttcattcatttgggaggtatattattcacgccaaagtgggaaaggttacagttttgaaggctgtgtgatcttgacggatttattcattgctctgaactttcgagttactgtacgtaaaatgaggctaaccaataccaccttaaagaatgttgtgagtgtcagatgaagtaatgaatgggaaaatcattttgaaaaatgtaaattgctgctcaagtagacattattgtgtgaaatagaactaaagagactaaaactaaataatgacaatagtttggtttcctgtctaggcttaattgctagctgagatagtagcttctgaacatagtctcatttgtaggtcccaacgcccttttgttgaaaagaggctgacatagatctctccaggctggttaacatcttcatgtgctttagggcattgtgagaactatgggcctacatcaggacaaacttgattgattgattggttttttgggtcagatcttaaaagtctggactagacaaactgtagagctgtcattcttgtatttgttttgtgttttcaggaagcccgaaagatgagatcaatacaggaaaccctgggagagtctgggagtttacttccaaataaattgaataagttgttacagaggtttcctaacaaaccttacctcagctgaaaatggacaagtattttcaatgactgaaatatagcttctgacaactatgcagaggcattttagagacattggcattgccatgccctctttggagggtagaagaggcaaaacacttttttcaccctttggaatcatagtatgggtagaagttatgatttatcttgaaataaaatcctctgaacagaacttggccttttgttgtgaattaggtactctcttcattcttgagcctcccctagaccctggaaattctttccttcctgatttgccctaggagcaggacaaataccgttgtattgtctttccctgcatttgaagtcttttacaccatttagtgcccttgcttttggatgcaataaggaagttgaagttgccttcgtctgtaaatacttagtgattgcctattttgtgcgtagtccctgcaaggtgctctctgaataataaagttaacaaactggtgacctagaggttctgcagatatgttttatttgatccacgcagttaaaaaaagttttaaaattagctggtcacgttcaaaaataggaaaaaaagtcattaaaatttcacattttagctgtatttatttatttgtttaagacgcagtctcgctctgttgcccaggctggagtgcaatggcactatctcagctcactgcaacctccgcctccaaggttcaagtgattctcctgcctcagctttctgagtagctgggattacaggcacccaccatcatgacgggctaatttttctattttcagtagagacggggtttcaccatgttggccaggctggtctcgaactcctgacctcaagtggaccacccgccttggcctcccaaagtgctgggattacaggcatgagccactgtgcccagccacttattttttttaataaaaaaaattaaaagctctggcagccttattttcttatttccacctggcagtaattaggtagagctgattatcatttgtctgcattctccagtgacctcaccactggactctacaaaatggtgaaacagaattaacaaatgtctactttgtttattacctgtttccttctctcaagttagctgcctagttgctgaaggcattcgcttttgtgattcccctgatactaggaaaaattgcatagcattttatgtatactctgccctttcaggcataattcagttagctttttttttttttttgagatggagtctcgctctgtcgcccgcgctagtgcagtggcacgatcttggctcactgcaagctccgtttcccgggttcacgccattctcctgcctcagcctcccgagtagctgggactacaggcgcccaccaccacgcctggctaattctttgcattttcagtagagacggggtttcaccgtgttagccaggatggtctcgatctcctgacctcgtgatttgcccgcctcagcctcccaaagtgctaggattacaggcgtaagccaccgcgcctggccttaggagttcttaacctaggtcaatagactccagttaagacgtctgtgaacttgggggataatttatatttttaactccaactgaaatttagcatttcagtcagggctatggaaaacaaaccacagtaacattatcaaaacctatatgaaatcatggtattttcataccatgttacagttggttacaaatatctcaaaaagcatttatactcatcactagcttcaaaattatgatagttactacgcttcctcctagatcttgtcatttaatgtgtaaataaaggagcactattacgttacagatttgttctattaatagtttaataattgtatttaaacaactggtttcctttgtaattcttggtattttgtgcatttgtaaacgatctgagaagggggtccagaaacctacctagactgctaaagggtccatggcacaaaaaaaggttgagttactagatccaaaggccgtatggacaaacagtacaaccatttcctgaaatcaaatgcattcttttctgatgtttccccagttagaccctataaaaaggtcggctggattgcagacttctggactacgattcccagaaggtggtgcggccctggggcctatccagagttaagacaataactccatccaatagttgctgtcctctcctgacagcctacaattcccaacatgcatggcggctgtttatgccttggggacattatggactccgagttgttgctgggatctgtagttgcttcgtataacgttgggagttggcttcctcttatgatgtctgagggtgggctcgagggaaaaaaagcaaatgcagccattaaataaaagtgtcccctacatccgcccgtacccgatccggatcccgagcgcgcgagggcggaagtggtggtggcccgcgcggccggaagtccagatcagctgatgggggaggcggctccgcagccgcctagaggccccagccgccgagcgcttcgtcccggccctaagtctcggagactggccaagatcaccgcttgcaccgcgctgttgggcgaggcccggtcccgtctctttcccaggcctgagattctcgcccggcacggccgccctgagcgccccggccacccccagccccggctcgcccctcaggccccgggcctcccctcaacccccggccggcggcccaggccccggatccgcggggggggacccggccccggggggtgcgggccccatggagctgatgtttgcagagtgggaggacggagagcgcttctcattcgaggattcggaccgttttgaggaggattcactctgttccttcatctccgaggccgagagcctctgccagaactggcggggatggcgcaaacagtcagcggggcccaattcccccactggcggcggtggcggaggtggcagtggcggtaccagaatgcgaggtgagagtgagctggggggaagaggagcggcaggccctgcttgggcctcgctcgggagctgtccgggaccaggagctgtccccgaccaagagctctcttcaaccaggggaagaaaggggagctgtccccggccgggagctgtccccgactgggagctgtcccaagcttagaacagacttcagaactcgcttttccggccttcctggggtgggctggcttctccacacctgtgtgtgtgtgggtgtgtgtgtgtgtgtgtgcgcgcgcgcgcgtgcgcgcgctgtgacagggagatcctgtggacagaaagtaaatctttcgtcactcctttgccttagagaggggataagggagaagaatcttgtctttgacttgggaatacttaagtgagttcagtctgaggcataccggaaagtagaggaagagaatgtgggtagggggctgattgtgaagaagtgaccacttgtggcttgtcaccgcattgcaaagtgcattgggagcttcttgcttcggggtgatgatctctgatcccagaagcaccaagaagggatcctacccagaggaaaatagaggtgaactggcctgccagagagtccatagttcataggtttagatcatagactttgcttctggccatgtcaaatatctgtcagaagccaaggctgggacttgcctgctgtgccttcctcatggcacagtttttgtcctggtcctcagtggaagctggcttttttcagcagttgagatgtttaatttgtgtgattctactcaggcctttccaagagtcctgttttccaaactggcttgtggagatttctggtgctcctttgggacagagagaaatttacatatatcactttttttttttttttttgagacggagttttgctcttgttgcccaggctggagtgcaatggcacgatctcggctcaccgcaacctccgcctccccagttcaagcgattctcctgcctcagcctcctgagtagctgggattacaggcatgtgtcaccatgcccggctaatttttgtatttttagtggagaccgggtttctccatgttggtcaggctggtcttgaactcccgaccttaggtgatctgcgcgcctcggcgctccggaagtgatgggattacaggcgtgagccaccgctcccggcatatatatcactttttaggagtgtcggactggtggcattcagcttcagttggagagaggatatggcctgtgtacacacacacaaacacacacagatcataggcagttttaccgtgggtcttctgtggccttctggcttctttcatatttgagtatgtgggtggtcttggggcttagtgctccctcactttgagggaagtaactgaagtcatagcgatgaagattgttaacatattggtatcttcctggtcaggttaaaatctgggaaaacatgccatattaccccagtcccccgacttcagtcactgacttgtaaaataaaggggttggccaggtgcggtggctcgtgcctgtaatcccagtactttgggaggccgagtcgggtggatcacttgtggtcaggagtttgagaccagcttggccaacatggtgaaaccccatctctactaaaaatacaaaagattcgctgggtgtgttggcacccgcttgtaatctcagctacttgggaggctgaggtgggaggtaagtttgaacccaggagggagaggttgtggtgagccaagatggcaccattgcactccagcctgggtgacagagtgagacttcatctcaaaataaataaataaaaatcaaaaaaataaaataaaggggttaactcttctaaaaaggttctttttaattctatgattttctgatctattaatgtgactagcaattttgtgagatgtagtttgtcatgttatcactactttttggttaaaacactgtggaaaaccttgagtggtaactttatcttagtccaggtgattccagttgcagcagtagctaggtgccctgcgataactctctccccttgagggtttccagtgtgggaagttgtcatttaggcgcgccaaaagtggtctggcctctcgtgcttcttgagatcccttccgggctctggtctatcttgtctccttagctgggggcctacagtcatctagagtaaaagggatggttaaaaaaaaaaaaaaaaggcaatcggagrcaagaatgccagaggagagacattaaccatgtaatttgaatttaaaatgctcatggaatatgggaaattcagtgctgagccatgtgagcagggttacttgctagggtcctggaacgcacctgtctggccaggagtttcttaagatatctctggtatcttctgttctagaccttaggtgtagccggctgtgggctggggattatccagctcccctttcccatatggagccttaagggttagtgtatcctgatagggggatccctaggactttcatccaggtctcttctttctttcatagtgaagatgaggcccaggatgttgtactggcatgagtgccaagagaccatggcccttttcatttcctattctctttcccctgatcccaaccattgtttgcaaagatggactggtgatcccattggtggagctgtcagcaaagcaggtggcatttcatatcccatttgaagtggtggagaaagtttacccaccagtgcctgagcagctacagctccgaattgctttttggagcttccctgagaatgaagaggacattcggtgaggccaaaggactgatggtggggagcggggtcctgatactccacactgtctgctgggtttcccatagaacaaaggagacattgtatttggggcagtggtaagaggaagacaagggagggattgcctgggattccactccctcccccccaccccccgccctggggaaggaatgaggctagggagagagtgcctagggcattgtggtctctgacagggtctgccaaaggttatttgctgagttgtggctgtgtcctcttcttcacccccaggctgtattcgtgcctggccaatggcagtgcggatgagtttcagcgaggggatcagctcttccgcatgcgggctgtgaaggacccattgcagataggtgagtgggccatcatgccatgtggcacatcctgctcctcccatcccctggcttatgaagtaagaacacaccgcaagaagctggagcatgttgtctgaataactgcagggccagggtcaagggcagagacccaggtcctgacagcactccctgaccatgcccccatttctccccagggttccacctgagtgctacagtggtgccacctcagatggtccctcctaaaggggcctacaacgtggctgtgatgtttgaccgctgccgggtcacttcctgcagctgtacctgtggggctggggccaaatggtgcacccacgtcgtggcactctgtctcttccgcatccacaacgtgaggccctcccaatttatcccggccctatcctacactccatcccccccttctctgctgcatgcctggctacaatgtgagccccctcgcctcgcctactctgcctctctgtcccccagctccagctccagcaaacctgttctcagattgttccatttttctctgtgtccccttcaggcttctgcagtctgcctgcgagccccagtctcagagtccctgtcccggctacagagggaccagctgcaaaagtttgctcagtacctcatcagtgagctccctcagcaggtgggtgaggtcggcaccccctcctgcaattagctccgggccaggccgcataacagccttcctgttaggcccaggcctccatgggttcacctaggccgtgttctgcctgcctccgtctctttctccctcagatcctccccacagctcagcgtctcctggacgaactcctgtcttcccagtcaacagccatcaatacagtgtgtggagctccgggtgagtgtggtgagaaagattggcagtaggaagaaagccagcttgtagtacagagcgccatttactcaaggcttgctgttgtcaggcaaatccaggcccctatctctagatgactgactgmctgtcatcctcagaccccacagcagggccctcagcatcggaccagagtacttggtatctggatgaatcgacactcactgacaacatcaaaaagacactgcacaagttctgtggcccctcccctgtggtcttcaggtaaatcggatctctgcatacctgtgtctgtggtggagggggagcgtccctcaggctgatgacagatcctttcttctattcatgcctgtgacccctaccttttattccctgaactggcacagtgcctggcacacagttgtcactaacgaattgatggaagatgatgaccttgtacagtcacagagtggtctgctcttacctagcaagagttccttttcttcttttgatagatcaggaaatggaaacagagaaagattttttaaagagtttttgtggctgggggcggtggctcatacctataatcccagcattttgggaggctgacgtgggcagatcacctgagatcaggagttcgagaccagcctggccaacatggcgaatctccatctctactaaaaaaacaaaaattagccaggcgtggtggcgggcgcctgtaatctcagctacttgggaggctgaggcaggagaattgcttgaacccgggaggtggaggttgcagtgaggtgagatcgcgccattgcactcaagcctgggcgacagagcaagacttggtctcaaaaaaaaaaattttgttacagatgtctttttccctctatcttctgtattttggggccggaagcccttttaggtttcattcagccccgtcttactgtcatggttttctgttcctctgcttttacagtgatgtgaactccatgtatctgtcttccacggagccgccagccgctgctgaatgggcatgtctgctgcgccctctgaggggccgtgagccagagggcgtctggaacctgctaagcattgtgcgggagatgttcaagcggagggacagcaatgctgcccccttgttggaaatcctcactgaccagtgcctcacctatgaacaggtaatcactcagcgttggggagccccgtggtagctcattctttccctccccctgcctcatcctcctcttgctgaaatggactctgggagggctactctgcctttctctgagctctcaggtgcagctcacagccttctttgtctccagataacaggttggtggtatagcgtacgtacctcagcctcacacagcagtgccagtgggcacacgggccgtagcaacgggcagtcagaggtggcagcccatgcctgtgccagcatgtgtgacgagatggtcacactgtggaggctggccgtgctggaccctgcactcagcccccagcggtgagtctcccctgaggctcaccacagaactgagcctgggccagctcaggacagactgagccttcatctccttgtttgcagagacataccatgattttagtcctcgggaaacgggaggtgctgagcactggtgttagcagtgatttacgagtcctttttctgagaggctttcatccttccttcccctaaataacacccacttttcaaaattctccagtgtttcagtgatgcttatggggctgggtcaagaagtactttcctgtatcctttccccatgcctctctttggggtgtacacctactccatgcccatcctttcccagtagcccctcagcagcctcctgccccttgttcccacaggcgccgggaactgtgtacgcagctgcggcagtggcaactgaaggtgattgagaacgtcaagcggggccaacacaagaagacgctggagcggctcttccccggcttccggccagcggtggaggcctgctacttcaactgggaagaggcctacccacttcctggtgtcacctacagcggcactgacaggaagctggcactgtgctgggcccgggccctgccctctcggccaggtgcctcccgctctgggggcctggaggaatcccgggaccggccccgaccccttcctactgagccagctgtgcggcccaaggagcctgggaccaagcgaaagggcttgggtgagggggtcccctcatcacagcggggtccccgccgcctctcagctgaagggggagataaagctctacataagatgggtccaggtgggggcaaagccaaggcactgggtggggctggcagtgggagcaagggctcagcaggtggcggaagcaagcgacggctgagcagcgaagacagctccctggagccagacctggccgagatgagcctggatgacagcagcctggccctgggcgcagaggccagcaccttcgggggattccctgagagccctccaccctgtcctctccacggtggctcccgaggcccttccactttccttcctgagcccccagatacttatgaagaagatggtggtgtgtacttctcggaagggcctgagcctcccacagcctctgttggcccccctggcctactgcctggggatgtctgtacccaggacgacctcccttctacagatgagagtggcaatgggcttcccaaaaccaaagaggcagcccctgcagttggagaggaggatgatgactaccaggcgtactatctgaatgcccaggatggggctgggggcgaggaagagaaggccgagggcggggctggggaggagcacgacctgtttgctgggctgaagccactggaacaggagagtcgcatggaggtgaggggatggaaggagggagggctgggtgctccttagccacaactgggaggggctatctagctctagttgggagtgtcaggaccatcagcaggattgtgagaaccctgttgcaggcgccgaactggtctccctgctttcagtctactcacttttctgcttccacgagattttcctgaaatgtgatggtgtcactctgctgcttaaaacccttcaatgggttcctgttgcccttatgataaaatgaaagtggttggcatgacctgtgagggtccacttgatctggtctttgcctgctttgccagcctcacttggctgctctgtcctttgcactccagtcagctgaatcactcatgtatctgccatgctctctctcttgcctccaggattttggacagattgacctttctgcctggaatgctcttccccattagcccgtgtttctccttcaggtctcagggatcttaaagatcacttcctctagggagtctctctgatactgtccctgtgccccaagatatcccacctgcttccccttgacctttccctgtaatagctggcatcacggtggcatgtgtgtttatgtgtctgtctttctaaccagagctcctatggagcggcacagggcctggcatgtagcaagtgttcaaggaatgttggctgcatgagtgagcatgatgtcctgctcctggaagttgggactttaacctgtctggtcccatgtcctccttccaggtactgtttgcctgtgctgaggccctgcatgcgcatggctatagcagtgaggcctcccgtctcactgtggagcttgcccaggatctgctagccaacccacccgacctcaaggtagagccgccccctgccaaggtgagagacccccttcctctaccttcccctcccccacttacccccaacctgctcccatgccccaccccaagtgagagcatccttctacctccaccaaggtaagtcagaatcatctgcctgtctcctgtgtttcttccctttctagggcaagaagaacaaggtatccacgagccgtcagacctgggtggctaccaacaccctgagcaaggcggccttcctgttgacagtgctaagtgagcgtccagagcaccacaacctggccttccgagttggcatgtttgccttggagctacagaggcctccagcttctaccaaggccttggaggtcagaggctccatctcagccttgtatttcagtctctttagagccttgcaccttgatctctattgacacaccagaggtctgagctccttcctgtgccctcaggtgaagctggcataccaggagtctgaggtggctgccctgctcaagaagatccctctgggtccaagtgagatgagtaccatgcggtgccgggcagaggaacttcgggaggggacactctgtgactatcggcctgtgttgcctctcatgctggccagtttcatctttgacgttctctgtgctccaggtatgatgcctgaccctacagtaagtggggaactggggtaggggtagctttctctaagaaagaccaagagccccaagtttctgaatcacctttaggacccatcaggcagcttcatgggtaggtctgtgatgatgaggattttgggttcccctgtattttttcccatgcatgatacttctgtctgcctgacttaccccaacttttatacagtggtttctcccacaggttcccggcccccaagtcgcaactggaacagcgagacacctggggatgaggagcttggatttgaagcagcagttgctgccttgggtgagtcttgagcatatcaacgagctaagcctggttcaggtcttgaaggacatgagacctgtgccttgttgtgaagggctgtatggtaatgggaaggtcaggatgacatgtgtgagccaactagtgcctgtaagacaggaattgagggcaaaaatgtgtgctatatggctgggcgtggtggcccatgcttgtaatcgcagcgctttgggaggctgaagcaggaggattgtttgagctcaggagttcatgaccagcctgggcaacctagcaagacctcatctctacttaaaaaaaaaaaaaaaaaaaaaaaaaaattagccaggtgtggtggcacatgccttgtgctgccagctactccagaggctgaagtgggagaattgctttagcctggagattgaggctgcagtgaactgtgattgcaccactgccctctagcctgggcaacagagtgaaaccttgtctcaaacaaagaaaaaaaaaattgtgtgctatgggtattgggtattgtaagggcagcaaaacaaaaatctagagaaaggcctaagggaagtggtagaatatggaatgtgggttaaaagatcagtaggtcctaaaccagcgaacaccatgagtaaatacacaacgcaatcaagttttcatgagaatgaggaggccagcttccctaaaatgataagtacatgctgggtaagcagattggacctggttatgaaggttttgaaaagcacaccagagcttaggctggatataatagtcaacgaagacttctataggtgatgtgggttggaccaagggaaccccttacttcatatgctgatggcttgggaaccctggcctcttacctttgctgtcttgggaattatgactactctcaatccccataaggtcctctttctcgcaggcatgaagacaacagtgagcgaggcagaacatcccctcttatgtgaaggcacacgtcgggagaagggtgacctggcattagcactaatgatcacttacaaggacgaccaggccaagcttaagaaggtaagagactggggctgggtgcggtggctcatgcctgtaatcccagcagtttgggaggcagaggcgggcagatggcttgagcccaggagtttgagacaagcctgggcaacatggcgaaaccccgtctctaccaaaaaatacaaaaaattagcagctgggtgtggtggcacatgcctgtagtcccagctactcgggaggctgaggtgggaggattgcttgaacccagtaggcagaggttgcaatgagctgggttcacgccactgcactccagcctgggtgacagagcaagaccctgtttcaaaaaaaaaaaaaaaaaaaaaaggcaaggtactggggcctttgacaggcagagaaagagagcacattttactacctttctcagggagtttccagtacaatgagaaaagtgctattttaggctgggtgcagtggctcatgcctgtaatctcagcactttgggaagcagaggcgggaggatcgtttgagaccaacctggccaacatagtgagaccctgtctctacaaaaaattagaaaattagccgggcatggtggcgcgcgcctgtagtcccagctactcgggaggctgaggtgggagaattgcttgagcccaggagtttgaggctacagtgagctataatcataccactgcactccagcctgggcaacagagcgagaccctgtctcttaaaaaaaaaagaagaagaagaaaaaaagaaaagtgctcttctgcccataggaggtaagtagggaatcttggggacatctcataaagaataagagaagaccaatggttcttataggagtgcttgggcatggggtggaagaagagaagcagagggcataaagtcattcattcacttatttcagtatttattgactatcagtatattctgccctgtggtgttaatggaggataccaagataygttggggttaaataagttacaaaaagacatgtaaaccaggaggtcatcctgtggttgtaagtggggaaggctccctgaggatgtagcaattggctgtttcaaggagaaaggaaggtaatagaagtcaggagctaaagggcatcctgtcactgcttctctggaggtcactgcttctgtcttccagatcttagacaaactcttggaccgagagagccagacacataagccacagacgctgagttctttctactcatctagccgcccaaccacagccagccagaggtctccttcaaagcacgggggcccatctgccccaggggccctgcaaccactgacctcaggctctgcagggcctgctcaaccagggagtgtggcaggggctgggccaggccccactgagggcttcacagagaagaatgtgcctggtgaggtgggggcactgggcaggggggatgaatggtgtggacctatgttgaggtcccctttcctgggctcatcccagcgtcctgttttcctcacctagagagttccccacattccccctgtgagggtcttccatctgaggcagctttgaccccaaggccagaagggaaggttcctagccgcttggcacttggcagtcgtggaggctataatggacggggatgggggtccccaggacggcctaagaagaagcacacaggtaggatagcctgtgggctagcatagagggaaggataatcctgaaggttggagtcttaacatctgggactcctgacttctgagactgacttctcttgggggttaggcatggccagcattgacagcagtgcccctgaaacaacatcggatagttcccccaccttaagccggagaccacttcgagggggctgggcccccacctcctggggtcgaggtcaggacagtgacagcattagcagctcttcttcggactccctgggctcctcatcctccagtggaagtcgccgggccagtgccagtggaggagcccgggcgaagactgttgaagttggcaggtcagtgggaagaactccccatcttccctgatctggcccaccctcagagccacacccctagtgcaatccaaccattgtctcccagcatcctcactttccctggtccttcccaacctacccggatgcccatttcaaagaaaccccaacccccgtccctaccccattgccccttcaggtacaagggccgccgccccgagagtcatgcccctcatgtacccaatcagccatcagaggcagctgcacacttctacttcgagctggcgaagacagtgctgatcaaggcagggggcaacagcagcacttccattttcacacatccatcttcctcagggggccaccagggtcctcaccgcaacctgcacctttgcgccttcgagattgggctttatgcccttggcctgcacaactttgtttctcccaactggctctcacgtacttattcttcccacgtttcctggattacaggtaaatcatttgacctgacttgggtatgggagggggattaattggtggggataagacccttatctttgtggggttactgatctgataaaaagacattattctcacaccccagtggtgcccacactaacccaactctgcccttctctcctttcccctaaggccaggccatggagataggcagcgcagccctgactatactggtagaatgctgggatgggcacctgacaccccctgaggttgcatccctggctgacagggcatcacgggcaagagactccaatatggtgagggcggcagcagagctggccctgagctgcctgcctcacgcccatgcattgaaccctaatgagatccagcgggccctggtgcagtgcaaggaacaggtatttctacgggcaatctgggaacctcttctggggcatctgggcagggaggttgggcatgggaaagctaagggcccagctcttgattcccgtatcctggagtttacagatgattgttggtcctctcatggcaacattttacccattaatgtgctttcacacccatctttcctttaccttacaactcaaaggttaggtttatttctattttacagataaggaaatggaggcctacggtttakggaccaagatgatcactcaggatagaaaacttakggaaggcctcatacatctaagacttgaatgggagggggctgttaaattagtttggaactgggactataacctgggtcttgactcattttggtcagtatttactcagtgtgtgaagcactcactgctctgataatggactctaagcattgacactgacctctgatgattccctgggaatgagacagctctgagggagacattggaatctcatctaacaccttccatgtggtaaaggcctttcccccttaacactctgtgcccctctcttccaggacaacctgatgttggagaaggcctgcatggcagtggaagaggcagctaagggtgggggcgtgtaccctgaagtgttgtttgaggttgctcaccagtggttctggctrtatgagcaaactgcaggtggctcatccacagcccgtgaaggggctacaagctgtagtgccagtgggatcagggcaggtgggraagctgggcggggtatgcctgagggtagagggggcccagggactgagccggttacagtggcagcggcagcagtgacagcagcagccacagtggtgcccgtcatatcggtggggtctagtttatacccrggtccaggactggggcatggccactcccctggcctgcacccctacactgctctacagccccacctgccctgtagccctcagtatctcactcacccagctcaccctgcccaccccatgcctcacatgccccggcctgccgtcttccctgtgcccagctctgcatacccacaggtgagaccagtgttctgctggggggtaaggcatgggaaaatactgggaattcatagggggttggagtgggtactctgggagtataattggtcagtcggagagtcctggtgaggtggtgggagtctgggggacccagcccaactaaaataagaaatgacggccgggcatggtggctcatgcctgtaatcccagcactttgagaggccgatgtgggtggatcacttgaggtcaggagttcgagaccagcctggccaacatggggaaaccccgtctctactaaaaattagctgagtgcacgcctgtaatcccagcttcttgggaggctgagatgggaatcacttgaacctgggaggcagaggttgcagtgagccgatatcgtgccactgcactccagcctggaggacagagcgagactctatctatctcaaaaaaaacatgtcaggatagcagcttgtgggggtgaagcacgacagcaacatcctaatcaagtttggcatcttcccctttcttctccctgcccctagggtgtgcatcctgcattcctaggggctcagtacccttattcagtgactcctccctcacttgctgccactgctgtgtctttccccgttccttccatggcacccatcacagtacatccctaccacacagagccagggcttccactgcccaccagtgtggcctgtgagttgtggggccagggaacaggtgaatggaggggaggcacactgggcaggggaggtggggagggaatgttctttgtctctctttgggctctgagttcctcacatggctctcaccccacttagtgagcagtgtccatccagcatccacgtttccagccatccaaggtgcctcactgcctgccctgaccacacagcccagccctctggtgagcggaggttttccaccgcccgaggaggagacacacagtcagccagtcaatccccacagcctgcaccacctgcatgctgcctaccgtgtcggtgagaggacatccctttctgtgctcctacctgcagttgtgccagtggctcttcagaggacccttcctctagctcttcatttgtttactgtggggtcaggtgacaggttggggtaaagggtgaagaggatacaccgtaccatgtgcccacccttatctatctcccaggaatgctggcactggagatgctgggtcgccgggcacacaacgatcaccccaacaacttctcccgctcccccccctacactgatgatgtcaaatggttgctggggctggcagcaaagctgggtaacacctcccctccctaggaccattgccccccccccacctgctctccccaccttccttatcccagacctccttcctagctcttgctcagagttgaggccttggtcgggtatgtgtgcgtgcgcggggggcggagggttacctcagctcctggggtggagggaggctctctgccaggccagagctgagatctgtaagttgggtccctagggcagaggtggccacccccgtctcatgcccctccccctgccccccaggagtgaactacgtgcaccagttctgtgtgggggcagccaagggggtgctgagcccgtttgtgctgcaggagatcgtcatggagacgctgcagcggctgagtcccgctcatgcccacaaccacctgcgtgccccggccttccaccaamtggtgcagcgctgccagcaggcatacatgcaggtgacaacctagaattatggagcagggtggagcacttcctgggtggtcttggaccagagggaggcagggcctgtttctgtgctttgtactaaggctcatcctgcacacatcctcctccagtacatccaccaccgcttgattcacctgactcctgcggactacgacgactttgtgaatgcgatccggagtgcccgcagcgccttctgcctgacgcccatgggcatgatgcagttcaacgacatcctacagaacctcaagcgcagmaaacagaccaaggagctgtggcagcgggtctcactcgagatggccaccttctccccctgagtctttcaccctwagggtcctatacagggacccaggcctgtggctatgggggcccctcacacagggggagtgaaacttggctggacagatcatcctcactcagttccctggtagcacagactgacagctgctcttgggctatagcttggggccaagatgtctcacaccctagaagcctagggctgggggagacagccctgtctgggagggggygttgggtggcctctggtatttatttggcatttataaatatataaactccttttttactctagtcgacctgggcctttcccttctttccaaattccatgtgcagatgaaccttcaactggggaggaaacttctgacacttgctttagtctaggtttttcccactccagggaggcagacaaaacagaaaaataaggatgtttattaaggacatttctagcccacagctagggctcatactcggctctatgagccactgtccgacctcatccccattcaatgtgaatgacattagggaggccgggccacaggtagatcccactgcctggctaaaggggccatagcaaggggtccctcccatgcaaggggtctctcccatagccaggtatagaatagatacactgctgcggatgaagagggaaatctcattggactaatacattcccctacaccctgcctggaccctctcattcctccccacctcccaagatgatgggtcaaaggtacctagcactattatgtggggtaccaaaggaagcccctttatttgtcccagaactgtgggaaaaggatacccttcccttctcagccatctcaggcctgggggctactgaggtagagggggaggggccaggccactctaatcccccttgtgggccctgctctggacctgacccttagggaagcagggggcattttgctggtatgggaggctgggacatcagcccagactggaatgctgcagttcttcccgaagccacgagggcactggctgtccaagccggctcagcagcttcgacaactccaaattatggttccggaaaaaatccgtaaggaaaagacgggactgacaggagaaaatgaaggcagaaatggtaagaagtgggacacagaatcagatcctggaagtggagagggattcccctgcccctggctttacttacctcagtgtccatatctggatacctccggcctttgctccggcctagacagcgagtcttaccaccttcaagtccctggcaccaaaatcccttatcatcatcaaacctgctcaacaggaagaggccatgaggtggcagggaaaagagaaactcaagttccataaatgcacaatgcccttccctgcccacagggacatgtctctccttgtgagacagagtaaatctatgtctctaacagacatggtcaacctgcttccccatttcccatacagtactcctcccctgggtcatgctctcccacctgagggtccgtgtgtagttcagaaagggtgtgatacccaggaacttctggatgctctccattgaggctgctgggttggtacgcagctcttgcccatccacaatcagcaactaaaaggacagggatgtggttccctctatattcctaagaagcctctgggctgaagggaagaagaggggaaggggaaccccactgagggctcttgtggggattatacctgtccagaggggtagtaagtcagccagcgttgtagatgggtagaatagtagccagggacaagacagcggttctgcagggagcgtagtgccagaggggtctgggaggaggctgaaatcacctgatagaaggtatagttcagagcaactgggtctccatgggctcgctgatgctgaaggacaaagagaaggaaggtgaaggactggtgatttgacagtattctgcccttacgcttggtctggagacagacagcacagcacgggtacccgtccccaaggcactagttaagtttctcaaacctcactcctttctccctctctagcagtcactgtcccctcccccctccccccaacctttagcctgtgtgtccctagcttcaggcagacctggtaccaggagtaggccctgtcagcagggttggtgagcactgtgatgatcttggctcgtggcaggagggcagccccccgccgtggtacaacttcagagtcaaagtaggtggcacttttttcaaataggaaatcagtgctggcattggaaggaacagggaagaaatccatgtacctaggaagtagcacagaagagagagaagcagaaaaatatgcagagtgaagtggccagaagtctgtgctgagggaagctggaatggggtattttgggggaagggagtgttcctctgagaaacattcaaatggggcccagtctcaccagtcaatacccttgtggtaattagggctgttgaagaactgaatctcctcaaatgtgctggggctagggaagctgctagttacagctgggtgcaggctcaggaagaagtgaatagctgtagtccctaaatgggagagaaagaccagcttcaggcagccattgtgggagggaagccagctcaacagcataagcttgaaggaagtgaaaaaataaccactctgggtaggaaaatcccctatggccaaactacaatgataggaggcaagtctgagagaggcccagggaagggctaaaacagtggttctctgctttaactgtgcaccagaatgacttgtgatcttgtaaaaacaccacagatgattctgatatacaaccagggttaggaatcactgcctcaagagactggatcaatgaggggtgggtataaaaggagttcctttttttctctcttaaaaattcaaattaaggccgggtgcggtggctcatgcctgtaatcccagcactttgggaggccaaggcaggcggatcacttgaggtcaagagttcgagaccagcctggccaacatggtgaaaccccgtctctactaaaaatacaaaaattagccaggtgtggtggcacctgcctgtaatcccagctactagggaagctgagcagaattgcctgaacctgggaggtggaggttgtagtgagctgagatcgtgccactgcgctccagcctgggcaaagaagtgagactcttatctcaaaaaaaaaaaaattattaaaattaaaaatacttttttcactcctgtgattacctggagagagaagagagttccttgacaaaaggatcctttgggtttaaggcagggcaagagaagttagctaaggatacttcacctgttttctggggtcccacaatgaggaacttcgggagacgatcacaggttttctccttggaccagatatctttgtgcctcttgtcatcacagggattctgaagccagggccaataatcagataaggcctattttttttttttttttgagacggagtttcgttcttgttgcccaggctggagtgcaatgcatgatctcggctcactgcaacctccgcctcctgggttcaagcaattctcttgcctcagccttctgagtagctgggattataggcaatgtgccaccatgtccggctaattttgtgtttttagtagagacagggtttctccaagttggtcaggttagtctcagactcctgacctcaggtgatctgcctgcctcggcctcccaaagtgctgggattacaggcatgagccaccgtgcccggcctggcctagtcttctcttaaacccccaccccggctgggcgcagtggcttacatatgtaatcccagcactttgggaggctgaggcgggcggatcacctgcagtcaggagttcgagaccagcctgaccaacatggtgaaaccccgtctctactaaaaatacaaaaaattagccgggcgtggtggcgggtgcgtgtaatcccagctactagggaggctgaggcaggagaatcgcttgaacctgggaggtggaggttgcaatgagcagagattgtgccattgtactctagcctgggtgacagagcgagattctgtctcaaaacaacaacaacaacaacaaaaaacaccccacccctatcatgtctctcatcagactgagctccacctttacctgccaaagggggcttcgctcctgagggaaaagttcaaagtacttctgtgcaagtgggacaggaggaagggtctgtaggcgcagccgtgtccaacactggaggaagcgcaccaagctctcaaaggtgtataggcccagccggtcatttccataattggacagatgggtcataaagatgctgatctgtaaggggtacctgcatgtcagatttggagagcctaccccacctctgaattagccttggtgaataaaggtcccagcctgcaaacaccttggctctccaatcttctagccgttcctctcagcaccttaccggattaagcagcactgtcagaaagagctctccacctcggatgctccggtctagttcacgagagcctccaggatactcattatagaagattgtgtgagtgaagaggccacatgtctgccggggcagcacctggagggaaaagaaaaaacagatgagatttgaaagatagaatgagaagtagatggaggacactgggatttatagaggactgagtctgaagttatagcaataaagctcttactgagggtgttaaaattttttcacctttctacccccaattatgtacccccatacttggactggcagttgatagagaacataggtcaatgcatgttgaaagctgtctaaatgttagagtttgattcaagcctgtattgggagtccctcaccataatgccattgtgaatgaagccacggcggtagcgggcagggcggagatggggatactcctcagtgctggtcacctggatgccccacacggatttccaggcctcatagagctgcgtgtggatggggtacacacccgagtggtggggggccacagcataccccaggtccgtgggaatcccatgctcctgggaatggcatagactctcaccaggacctggtgaggtttggggagtagagggtaaagagggtggggaagcctccaaataaagaaaaacgcaaaggataggaaaagggtagcccattaggggaaggtagaaaaggaagcatggctgggagaaattatggggaagagatccaagggtctcaccagagcaaactgtttgttgagcctcatctggtcagccagcacggagcgattgtggaacaggtgtggctgcatgtggctccacatgtgggggaaccaccagaactctttgcggtgcttcagcagcatgtcgtcccctgcatcctcctcctctgtccctatgaccacacgctgaccactgaccacagccagtcagcccctgttccctcctttattttgtaacaacactgaccaccttccatccctgatccttgcctaagactttctatttgccccactgccaacttgccatccagccacccatgcgaacctaaattcatgcccaccactagctcctcacagcagtctgaccccaaaccttgacccttttcttcaacttgtctgcccagggaggtggacagtgaagggacaggtcaaactatgatatgccaaaggagtaggggtataagctcaccagtatgatagaacttgcccgagaagcccaagttgaaggtgaagttgggaactaaggtcctgagtttgttctgggtggtcaacagagcctgggaagagtagcagggacaagagaaatcaggagagcagactgaacaggaaatacatgagaagtagcattcttcctgcctggaaaggcagggagtgtacctatgacaagctcagaatcaaggaagggagtctgacaggccagagtgtgaatagcttctaagaaaaaaatttaagtaacaagactgacctcaacatcagccaccttcatgcgggtcccttccttgcccacaaagatgtcatcgatgtctaccaagatgtagcggtcaaggtccaggcagaggcgcttgccagtgaggtatgcaacagcatcaacgaagataagtttgtggagccagaaggaaaggccatgtccaaagagcacccgctggatgccatcatgaagccccaggtcctgtaccacagtgggaagccgggcccgacgaagaactggtcctggcactgcgggctcagctggccgaaggctggcaagaagcactggttcatatgtactatgattggattggaagatggtccagtcatcaccaggcagtggccctggttctaggcggctggggcgtgtgagatgcagtagcggggcagaaggattcacttggtagt

SEQ ID NO: 97627 - DNA, 74046 bp, Homo sapiens
ggttaaaggcgccctctatgttccctaccccgtcactctctatccccattacttgattttactttctctgtagtaggacctaactccagtccaaaatgacctctttccagttacactgcctgcctacagggatgtaagctacaagaggcagagttttgctggattctcctcttctgtttcctaaatgactgtaacagaggagctactcagtaaaataaatgaatgaatgaatgaacaaatgtcccctgtgggtacatgcctggattcaggaggctgggactagattgagataaatccacactgagtttaagattccaatctagatggtattggtggtgtcagcctatctggattgctccccatacaatttactgacccccctatctctttctattcactgcccttcaatcatattctcgcagctccaccataaattgtgttagctatttgccctgggacatgctacttcacctttctaaacttcagtttcctcctctgtaaaactcccacacttgcagggtgatggtgagggttaaatagagtagcttatttagagtgcttagtgcatgtgccttgtaagtagcaagctttctctagacgttagctacgctggtgagttttgtcatcctcaccacacctccctttgtcatttttttttgacgctccccttcctgtacctccctgtgcccctcacgtttgcccaccagggggccccacatgccgctcttcctgcccaggtcgtccacgctgacgcatgccgcccgcctgtcgtcacatcagtacctcccttgtgcctctgatgacagctctgtcactgtctctgatgacagatttgtccactggttctgcctcttcactgcaaatatctcagccccttgcacccaatacttcattcattccataaatgacagcacctactatgtgccaggcttcaatggtaggtgttggggatacaaagagaaagatcagcaatgccctgccttcaagaagctcacagtctataggaggatggcagaggggtcaagaggcagagggggccatgccctggacttgatggatgagaaggccaggatcacattgctctttggaactaacccgctggctggaaaatgtaaggaagttcccccctatcaggccctcagctcctcacgttacatatttctacacttacctgaatttctcagctcagctcttcatccctagtgcctcaaactctattccagacacctcagttccttacaccagatgctgcagccctcgccccaaactctcattccaaaatctcctacgtcccaaactttaggagctcagccactcacctcaaatatctcagcccctcctctaagaaatactgcagtcaggccaagtgctgtggctcatgtctgtaaccccagcacttagggaggctgaggcaggaggactgcttgagttcaggagttcaagaccagcccaggcaacacagcaagacctcgtctctactaaaaataaaaaaagaaattagtaggacatggtggcttgtgcctgtagtcccagctactcaggagactgaggtgggaggatcacttgagcccaggagatagaagctgcagtgagctaggatcatgccactgaacagtctaggcgacatggtgagactttatcttaaaaaaaaaaagaaaagaaaaaaaaaatgctgcactcattgacataatctgtggtttcagtctttttttttttttttttttccagcttttagactcaggaaggatgggaaaaagtagtgatttggagaagcccactggtaggctttttctgatgtaccttccagggcaaagaggggcatccttcactccctcccagtgtgaggattgcttatttaaatactgtgtttacagtggctcatgcctgtaatcacagcactttgagaggccaaagcaggaggacagcctgaggccaggagttcaagaccagcctgggcaacatagcaagaccctcatttctaccaaaaaaaatttaattaagctcggtatagtggcatggacctatagtcccagccattcaggaggctgaggcaggagaatggcttgagcccaggagttagaggctgcagtaagttaggatcacaccactgcaccacagcctgggtgacagagtgagacactgtctcaaaacaaaacaaatgttgtatttgctttctcactctttcctatctccatgatcacatcttctctccagttttaaatgccgcaccattaataattctctcagagttccttggagagaggtcatgatctcatcactcctaattctccaaaactaatcatagaatctcagagttggaaaggacccagaagtccaatgggttccaaacttctttttagtcagggactcttaactgcaaccaaatcttatgtggaacgtcaatatatatatgttgactagctgttgcggcctggcctcgtaaccccatggattctgcttagaatatggattgaaaacccctcatggacgtgagactttgcaggcttcaaagagaaagatggtcccacccagtggggtgcctctggtgcttatcagggtactgatatctttgtcattccctgttctctgagctctgagcacagcctgagtgctggtgctgcccaggggactggctgcaaccagagcaacccagcccaaagaccccaggaggttgccatagacactgaagtggagggagctggtgagcttgttattatttgtgtgtatcttccctctaattgctgtagggtagctggaggttgtgtgggcgctacagcagtggggatagaggagggtgtatgtgcgagggtgtgtgtttgtgtgtgcacacagaagtgtctataggctccaaaccaccaccgtggatgcgtcagaggctgcgctgttgagagaagtagtgagggaggaagggaaaagtgaagtagagatacaaaggaaaaaggaggctggacaaggtggctcatgcctgtaatcctagcacttttggaggccaagacaggatgattgcttgagtctacgagtttgagaccagcctggtcaaaattgtgagacctcatctctataaaaaaatgtaaaactagctgagtgtggtggcacatgcctgtagtcctagctacttgggagggtgaagctgcagtgagccgtgacagcaccactgtactccagcctgggggacagagcgagaccctgtctgaggggttaaaaaaaaaagacgatggattgagttttcttctaattgtgtgaattctaattttctactttatttgaatgtttcaaaaagtaaaaggcagtgacaaacctatggtagggagtcatatttgttgaaaggcagctagctccacttatatagtactatgagtcacccctgaggcttcactccaatatttttctcatcactcttccttttacctagagacacaatgcaaaatgctttacgtggttaccccaaaacacctagtgttgaaccctcccctcagtcgggatgatgttcctctcacagcaggcacatgagactggtcagggttgtagtcctgttttacatttgccccaggatactcctaggggactccatggcagccctcctctgtgcttgttctgacctctcagggtctcctccactccaccttccattcatgaatagaaagtttcaagtatcagcctggaggtcaggaagcaagttgccttgagcacttaggaagggcacattgatgatcaactgatattcaaagttgcttctgctttggagatggatgacagaaactcaacacttactggcatccccatgtatgcaatctcattgccctaccccacactgggacttgggacctggctctcacccaggtgctttgagataggaagtggccttactctccactttacctcctgttgccctggggaggggtagggcatggtgctctggcactgctaccctttcccttggccctctctacccttctcccaagagaactgctaatgcttttcctttagggcttcatgccctcccattccctaatcacccctactgggcagtctggttcccaaagcagctctcagggctgttgggtcaggacaggaggggagcactcctggagagctctgccccacccacccctcagggaggcagcttgggaggctgggacacctctcagtcccctcctctggcagagcgagcctgctggcgagggagacccgactcccagtgggcgtcctgctgtaatcaagactgagtggcagcctctggctgagctccaccctgcccagttggggctggcctcagcctcaggggacagctgcccaggcaggtcaggaacctgcccagcctgtttgtcccccatcaagacagttatgtgcctctgtcccaccaacttgtgatggtggggacaggagaagggatggtatctccctctgccatcccacaaatatttactgagggtcaggggctgagtgtacaatggtgaacaaaaggtgcagaggccccgctttattggagcctacaattcagcgggaagctagtttttgtatttttagtagagacaggatttcaccatgttggccaggctggtctcgaactcctgacctcatgatccacccgcctcagcctcccaaagtgctgggattacaggtatgagccaccacgcccggcccagcaaatgtagttctaattaggcaccaagtactattctaagtgccttagaccatttaatgctgacaggcctatgaggtaggtaatattattgttcccagccgggcgaggtggctcatgaagccacctctgtactacatacatacttcattacttcatgtatgtactacatacatacttcattactacaacataatgaagccccgtctgtactaaaaatacaaaaaaattagccgagcgtggtggcgcgcgcccataatcccagctactcgggaggctgaggcaggagaatcgcttgaacccaggaggtggaggctgcagtgagccaagatcgcaccactgcactccagcccgggcaacagcgcaagactccgtctcaaaaaaaagattcagtgacttaccccaggtcacagagctgatcagtgagttgcctagaaatccaatccaggcagtttgatgcaagttcacgcttagacagctatgagatagctctactgccccttataccagtcaatgcatcactacaaaatgtggtaggtgccagaaaataaaagtacgagggtgccttgcaagaaaatggggatttcccctttcttccactttctcttctagcccccactgcacaaagccttttcaagtcttcctacttcacccctttcatttctggccggatagagaatactctttcatctctgcagttatggtgcaggaaggcagagtcctacctgtatccttgcccctggcctggtctccctgatcaacccgcgcctgaagggtttctttctaataatggccctggtgcttgcgcaagtctagactgtcagctcccagagggaaggcggctggcagctggctctgcgcaggctgggggcgcctcccgggcgtgcagcctggcacaggctccttgaccttggctctctccccacgtgctaggagcccggttgggggctcgggacccgcgtgtaggacccgtccagagaggtcagtggtccagactcctacactcctaacacatgcaccctcgcatgcacgttcccgagcccgcgcggggtccgccccgggacaagcccataagtcgcgaaccttccagctccgtctgcccagacaggtggcccggagcggggaccccctcccctcggctgccccgcgcgcctggcccagcgagggcggctccggggcggggcggggccggcggcgggaggcccctccccgggggcgggccgggggccgggcgggggggggactggcggggctgggggcggggcggggcgggcggcgcgggggtgtccctccctccctcgctctccccggtaaagtctcgcggtgctgccgggctcagccccgtctcctcctcttgctccctcggccgggcggcggtgactgtgcaccgacgtcggcgcgggctgcaccgccgcgtccgcccgcccgccagcatggccaccaccgccacctgcacccgtttcaccgacgactaccagctcttcgaggagcttggcaagtacggcccgcccgccgcggtcccctgcctgccctgccgcccgggagctatgcggcttctcgccccgccccccggccctgcaccggccgctgcggctccccctcggccgccccacccccgcctttcccgcccgccgccttcggtccccgcgccccccgcgcactgccccgcatccccctccgcgccctgcagcaactggcggggccgctgctccccacgcgccgccgcggacaccgcagaccccggaccgctcccgggtgccctccagccccgcccctccgcacccttcaggcgcccccctcccgaccacctcccaacgctgcccggttgctcactccgcaccctgaacccaggtcccacgcgcctcgcactcaggaccctccccagccctgcagccctagctctgctgcggagcccgggcgtgggggggctgtttggcgcccggccccgccccccgcgggtgccgctccaggctcccagccccgcggctggttcaatgggcacccccgtcccctccccccacccctgcagtggtcccgggagccgcgccgcagcctcagcatccccctcccctccgcactgagctggccgctgcagcagccccggccccccacccccacccgcggcgccgagcccggccactgcagcccccgccccgcccgcccccccagacgtttccagagctcagagtgcgagctcccgtttgacggggacgtcaaggaaaatagcatgggaaggggagttcttgatgtctgactgtgtcctctcttcccttgctgtcagttgagccgggatgcagtgagatgaaaccggctgtgggggggtttgagcctcactttgccccatggttgagggagatttctctttcaggggatgataccctctttttaatctttccttccccgaccttcarctgttcctgctgagagaagggcagggtctctctgctcccttctgccctggttctcttggccgggaccgcagggctgtctgagatgcagcaggtgtgtgttttcagcatcgcccacccgctcctgatgtgcagcctgaggtggaggctgttgccttgcccagggactggatgagggggtgggagcgcggcacgccacccacatctgttcagtgtcctgcggtggccgcgtccttttgcctcatgttggatggtggtggtcacagcgccggtgtgtgtgcatgtacgtgagtgtgactagaggtctggtggtgggagcatcatcgtccccagacttgaagtgtgtctgtgtcactctgccctgctccgtgtcccagttcttttccccttctccctccaggggtgctttctctgtggtccgcaggtgtgtgaagaaaacctccacgcaggagtacgcagcaaaaatcatcaataccaagaarttgtctgcccggggtgagtgttccctgtcttgacctcttcctgagggtgcctccaggggccatggtttcttttgaggaagccccaggaattgggggttgtgcgttttagcacttggagaggagttggaatttcagactggttggactttgtgtcaggctgaagccagaaaaggagttgcatgggggactggaagcgcccaggtacaaaagaatgaaggaagagatgcaagtagctgcagtggcccccaaaggctcaagggagttcggtcttcagggaggtggaggatatgggggtagtgggtggtacagaatggggagctcttaatttggggcatttggagcctctccctttggggcagtggtggctactgcaggcctttcctggtccctgtgccccagtggtgacttaggatggaaatgcagtaagtgagcagctctgacaaagccagcctcccctgcccaccaggcggcagaacagactcccaagggaagggaatctgtaaacatcaggggaggctgctactggcgagggcttctcaggaacaaattctgccagatgaacttgattgcttttttgatcaaattacaaagttggtggtgcagcagcagatgtagtctgtcctgggtggagggtgatgcctcatggtctagaaatcccaaaggcccggtttgggcaggaactgcactgcctccgaactgcactgcctccgagtgaggagcataaaggccaaggccttggggcctcacttgcgagatcctcccaagtacctgaggcttggagggtcagggcctgtctttcacaccttgaacctacactctctgaacttcctattgggtacttgccaaactcacctcatctgataggtgtagacccagcaatgtgtgaagtgctctgggaacaggtctggtgagtacagaggtcagatctcggagggctgcagggtgcagctgggggacaaaggttgtgaaactcagagaaaggaattagggctgggcagtaggatgccataaatatattwggagccaggacacatgccctggggaagacatgggctttggccaataatgacacgggtttctctgggataagagacataatagatgtcccaaatgcttagagaagctctacaattccacgggcttctgtcgtgttggcagttgttctgggacctgtttagcagggccgtgtccactccctgactggggactctctctccatccctctrgtagggcactaattgctgactcccatccagctccatctcttgctgttcgtgtacattgcctataaagttggacttgtttgttttctttctctctgggtaccttgagtctgaggatggttgccatagagatatgtgggcagtcagataccctggagtgggggtgggggggacaacaggggctgggctctctggcagacatcctctggccaaggatggaaggtgcaggcaggaacaatggcttgaggctggatacctctcttgcccacacagcagagccctggtgcatcagaaacagggctggcatctggtgtctccagttgatgatgcaatgctttgctctcttcatctcaccagtgtcctctgacccatgggtaagagaaggagagatggctgggagccgaattctgggatgtgaggataggtgatgtggtgacttcctgcagctgcctgactggggctttcatttcctactccttccctacctgcgtaaatttccatgacctgtgtgatagcctccctttcccttcctcacctccttttaaccttgtcccatctttcccaatggatatctttccctggccaaactggatgagacttgatttctcgttgatttttttttttttcccctcaagaagaggattcttgtgtaaaagtatatgcttcagacagcaactccccctctcccaagatggatatgccaagactgggctctgttgtgtggcctcatgtgccaggttgactttgggacagaggcacagatgataggcacagatgccagccagaggggtcagaatgtgtaagtgccagccagtactgtgtggaggtgggaaagtggaaaggggctgtcttggagatggagggaacaaggtggggctggactataggtgtgggcatgggagatgtgaactcctggagagatctgggccagggtagccatgggctggttcccatggggttagggagtgagggccatggcttccctgcagactctcagtttacactatatattttataaaggtgcagccactggagctgggtttcactcatcgctgtctgcctaggtctccgcaggtgttggatttctgtgtctgggaatgtcgtgggcccaccagggtcatctgtgaaggtctgaaggggcttgctgtgttcactgggtcttcctgcctcctgtctttcttgtttgtgattctctgggctacaaactgaaaagataaaaagagggtatagagctgtttctccttggcatccctggtgaggtggctaggagtcagggagagggatcacctgttcttctgggggggtccaatcgagacaggaagccttcttttgggctgttgtgtcttgtcactgtggcctcagaggcccacattggcggctaggttgcaaggtggggagttcatgcggatatgcgttgagcactgtctttgtctgcgggcctgtctacataaagtcactgaaagtcacataacgtcactccgtttgcttcagaaccgtgataggagtggagctgggctcttaagggagcccatggttccaagcttagctccactaggccgaaggaggcatttaaaataggcttggatgcaggagctagtgggccaggtgatggcaatgataagtcgttattttaagatttaagagcacccccctcaaggagcctgagcccttatgtctttttttatttttaaatcttcatattcccttcttatctttattcatatgcatacagattttcacctcgtggagcataacattttatatcctgctctctttgcttatatccaaagcatttcccccatattactacagttgaagggcaaatggtcctttcttctacgtcgtttaggatttatccctaaaacaatcagcatcacaagaaacttctgtatatgtaccatttatctggattccagttgcttttaccaagatagatactggggtaatgcccttggccttactaagagatgctaccggaaacagtgttttgaaatctgttataatactttaacatatttatttaatctgtacattccgtgtgaagaaatttcttttgaagctaaatgtaagcaaaagctttcctctttgtgaggacctgagaggtgagggaagggtccttatgtgtttctatacttctgcatgggcaggccctagygaagtgcctgacgtatgccagccacatacacattaaatgaatgggtcaagaggactatgtaaccaatcatggttgccttttggctttggctcctaggaaactcagagtcaagttgccagagcccttgtaccctgctacagacttgggtcctccctttctgatccagggagccaagctgcagacctgatacggctgctggaagagaggacagatgaggataaagacctgtgcttggggcataaggcagagtgggagatgtaggcagacatttagctgatgattcctccttccctgtcactaaatggcactatagggccactgttgggatctcttccaggtagtgattttcaattttagtgtgcgtaaggatcaccctgagtactagtttaaaaaatacagacttctgggctttagccacagagattctgctttaggaggtctagggtggagctgcagaatctgcatttttaacacatgctccagtgaatttcatgcaggtgaggcatgagccactctttaagagatgccacctaaaatctgcaacaacagttgctcttgccatgccctctggaattcaacagacacaccttggcccatccttctccagattgtgtgtctgccactatgtggccatctgtgcacatgggctgttctgtgattaggggcctcgttctgggcctcgggattggggtgtctgtgtctgaggctgcggcaagctgggtggctcgggttgtggcatgttggccaccagaagggtaaaggctgtccctttctgggtccagctggccctggggactgaaatgggatcccctggatggtgccagctgagagtccccgcccccttagtgttggcctgagtagcccccatgacatttgtgtcccctgtggtatctccaagtgagactttcctgttaaggatctgggtgaagtgagggaaagagaagggagggggaagcagtaatgcagggagtgggagaaggaagagaaatccacacagcactggaacacaggcctcgaggaagcatttaaggaggctgtgtgcgaaaccatgctttcctcctgaggataaaacaggccaatttctgtaaacagagaaatgggcatcctgcatatcagtgatggagcgcctctactttctctcctgaagggatggaagccgactgcaggtccctctgtgcaaaggcttctgccaggcggcttttgtcacgcggtcacgttgagctgtgggccttagcacacacaacactggcctgtccccctcccctcccacctgtcttcctagagtgacttggggtgctgcatcatggtgtggggatggaggtgggaaggttgccctgtcctgtcagggaggcccctgccttcttcctgctgcttcctctggtcccttgtcaccatacccttgttcgaagctgtgctgaaaccctagaggtgagtggctgaccccattctctgctgagactggagatagggaaggggaggctgggtgtgaccattcctgctcccatctgtatgcttgctgctctctgaacagctttggcagaccaacaagggcctgatcccatgggtgccaaaagggtggtgacaggaggagatgggcactttgcacctcttgaatgcctctctgcagagcccctttgtcacctacccatggccagacagatctgccgcaggaccgctggggaaatcaaagcacaaaagctttgtctggggtcttttttttcttttttggttttgtgctgcaggtgcccatgactttgccagggctcagacccagcgtcctcaggccgtgtggcctccacccactccttggcgcctttctttaaaacacaggttctggatactttgttcctgtgatgaatcttggcatatcacctcacacctctccatctaggccccaagctccaagcctggtggagcaaatccctcctcgttgctggctgaggccccattcccgtctgtacccacctctctgggctgtgcggtggggagatttccagccactcctccccaacaccatctccgcttcctgggccctatcagcagcagccgcagcttcccatctgctcccctcttttctcctccctttctttcccttcccccctgcttgctgctgccctgggaggagctatttttaggggctgcttcctgggatgttttacttggggctggttaccatgaaggaaatgtcaccaaaacagtgggcaaaggctgcaggcaccgggagccctgccggggggcatggagaacagacggctgacccttttctggcccttgagagcagccagagtgcccccaggcagagccttgccttcttggggcttgctagtgaccccttggggattttctctgtcaaagctgattgagggccttttcgctatagggcatttcttggagcctctcgcttcccttgccttgagatccagaggccaaagtggggctcaggtctttgtgtcaccaagttaaaactgcttgagtgagggttgaagataaggggaggatgctgggtacatgcacagagccttgggggttcacatgggaccatttcaggccccgtccctctgtatcacagcccccagctagtcaccaggtgtacatgtgtgagggcattagaaaccatggtcctgctcttgtgtgtcggatggactttgcttttaattggagactctttgcatctttagagtgagattcaaagaggaagggatgtggcatcacagtgtcagggtgaggtcggtgggatcgtggcttgggattcccactggtcagtgtcccaggcccagggctgtgcataagcagctggggaaggtggattatgacatcaaatccctgcgatgtccttgtttctgctcctcagagtgccaaggggaccagacggcggcctctgctgcttgggaagaagatgaaaggcactcaggagggcagcaagtgaggccgcctcccatggagccctgaaatcagtggggttgcaggaagtttctcacatccatgtttagggtcataggcacagacctgcaaaataccctttrcaaagttaagaatgtctttgagattggaacttgggagagtcctcagtcagagtaggaatgtgcatcctttcccacgtacagaggattgtatgtttacgtggcagcaggatcttatttgaagctagtgctggcatttgtgttttttttttaggaaaatgtcactaagtcaagcaggcccatccctgagagggccatggagaatctgtggccagccctccctggccccctgacctggcagaggaaggaaagggcattggagtaggcttctgtcttcaggccagagggggaggtggttcaggggcaggcttggtgcaccccttggctgcaagctatcacctccctatctgcttcctcttttctgcctcccctggtgcatctggtcacttcttgctgcccttcctgtgaaatcgtggcaccttggaccaagtcctgaagcacttgggcagaaggcgggagaggttgggtttctaggatccttgtttcccagggcctggctctggcctgggctcagaccactctggtctaggcaggctgctggggaaaggctggagctgcttctgctttctgctcctgttgccacctctgctaatgatggggaaaacctgcagagggctgtggttggagctgggctgaaggccggcaggggtgggtctctccatggcagtagcacacaggcaggcaggaagtggccctgtgcaaaagcgggaagtggcagttgtcaaacaggaaggggggggctgggctgtgggaggggcggggatgagcctggtagaaaggtgcgtggaggagggtccaccttggaaggtctgagcctctccctagtggttactggaaggaggggtgtctcaaggggagacacctttgcagcaccttgagatgccgagccagggccctcccactgtggaccaagcccattcagtggcctcgccctttttggggttggagatgctgcgtccagctgggatgcccttgcttttgggaaagatgctctagaaaccactactccatcctggaacccctctgctgccactgctgctgggatggaccctctgcttttttgcagccgtgggccagccctggatgtgactacaggacaggaagtgtcaggggaagagacaggagacaacagctggagaggctgggtggtggccgggcagtatgtggcagcaggaacggggagagcggggcaggtagaaactgctctgttcattgaggagagcttgtggatggcagggtgccacggctgcgaggaagaggagggaagcggacagtggcacttcctgcggcgttcccctctctctgaggagcccctgttgctgcccatcacctgcagactgtagacacaggtgggccccgccaaaacagggagggacactccacctccaggactgcaatggaggaccatgtggggagcccagaagccaggcaggagggcttagttgctgtgttgcagaccctgcatctgcctgggctgaggggacagtgggtcccattcacagtgtctctggtgatagctgtggccacaagcccagcccaggagaccctgtcaagcttctcactgggcccttggaaaggagctatatgccagaccttatgcaaaactcttgacctgtaccacctcagttaaacctcagatcttgctgtctctattttagaagtgaggaacctcttggccgggtgccgtggctcacgcctgtaatcccagcactttgggaggccgaggcaggaggatcataaggtcaggagatcgagaccatcctggctaacacagtgaaaccccgtctctactgaaaaatacaaaaaaattagccgggcatggtgatgggcgcctgcagtcccagctactcgggaggctgaggcaggagaagggcgtgaacctgggaggcggagcttgcagtgagccgagatcatgccactgcactccagcctgggcaacagagtaagactccatctcaaaaaaaagcaaaaaaaacaaacaaaagaagtgaggaacctctttcccaagataatgtgcctggctcactgtctcacctactttgggtcctaatcaaatgtcacctccttactgaggctttcttggactgccctactcaaatctgcactccccactttctctgctttttctacgcagcacttgccgtgacatctaacgtgctgttgagttttcttactgtccatccctcccccatacacaacccactagagtgtcagctccatgagggcagggatttttgtctgttttgttcgccactgtcttcctagcatcttgaatactgtctgtcacatagtaggcctcagtaaatatttcttttttttttttgacttgctctgtcaccccaagctggagtgtagtggcccaatcttggctcactgcagcctccacctcctgggttctagtgagcacatttggctaaattttgtatttttagtagagatggggttttgccatgttggccaggctggtcttgaactcctgacctcaagtgatccacccaccttggcctcccaaagtactggactgggattacaggcgtgacccaccgcgcccagccacgataaatatttcttgaaggaatgaatgaagctcgggtgggtttaatagcttgctggatgtggcagtgttgggctcaatccagggctgtctgacttcaaaaccgatgtgttgttaattgccatactccacagcttagaatcagaatgaggatcaaggtatagtcctggggttcagagaagacctgggccttgccgggaacacagggctcagctccttggagttaaggctgaactaagaggctaacaaggaccctctggatgctgggcagctcctttgaggagctgggagcctgagtctgtgtatcttctctccactcaaagtcactggtaaagcagagtgcccttatttttagtgctgttgctgttgtgggactgtaaccattagctagtaagagacttaaggaaggagataaacattaatcttctgggccttccctcagctgccacctccgcattgcaagatgctgttctcctgcacctgcccaggcaaccaagcctgagagttatgggctggagggtggtgaggtttgtgcccagagagagggccgtgggtctgtagctttggggctggctggcttggtacctccatctcaagtccagggatggaaggaaggtggggtcatgtcaacatcctgccagatctggaagaagcaagccccccagccaccaggcaaggctgttacagcctccttgagtgcctcgcttctggaggtcactggccacatccctgtgcctgggaccaagggatgccaggtgatctgggagttgggagttacttggggttctcctggctgcatcctggtcggtggtcatgctgaacccaggcacaggaaggaaggcctgacccagatctttgggcagctgggacggattagctgggcagcaggaactaatctctgtctgtccccacctccttccacaaagtagagctgttgctagagggaaagtttaggacaaagctgggtttggttagtgaaacaataaatgtgaatttcttctagtccataatccctacattatctcacactgacagtcctgagtttgaatcccccttttatccctttcctgctgtgggatcttgggcragttacttaacttccctgggcctccgtttcttccatcatctggaaatgtggacaatcatagcatttacctaatgggatcattgtgagggctgtgggaagatttacagaagctttttgctgtttagggtagaggcagggagacaggaatagcttggcagctatggatgtgaaggcccctgcccgggcctggataattcagggtgaactggactctcttccttttgcaccccctccaaagcctagagtcttaactcaactctcaccattctttatctggccataatagcacaggggtggagaaagagggctctaggctcagaccacctgcatcactgcctgttcgtgttaccttaggcagattactctatctttttaaacctgtttcctcggtaatataatagagctaatcagatccctacttcacagagtttctgtaggtatgaaatatggtaatccatgcctctgcctgacatgtagtcagtgcatagtaagcgattgttatggcgactactgttattagtaaacccttattaagcccctgtttacagaaagaactctagaaagcactacctggaaaggtacccccgcccttcgaagagcttgcaactgaaagataactgatgtaatatatgatgtgagaatcgtgagaagtgcattgggaaatcgggggggggggggtggagtaggagggagaagtcacagtctaccgagaggagcagggaagacttcatgaaggaggtgacttttggcaggatttcagcaagtagaaagagggaaggacagtgggggagggctgtgaggcctccgtgctgtgagtagcatcctctcttcccacgtactggagctctgccttcctgtggaaggaattgacccacgcagctcacttggatctggggacttgtggatttctggttattccaccaaaaccaagtaatcctggagtctgaatttgaagaggtcaaagcttacagccatggtggccaagaggactccggggagaagcaggatttgtgtcctggtttctctttctataaaatgggcatcatactaatgccaacctcctagagttgttatgaggataaattaaaagaggcagctgcctggtgtagaagtaagctctcaataaatgttagctattattattttaagtcatcattatcttgatcatcaacctctttattatcagcatcattatgtttcaggcttgccatcaggactatgtagagaatatatgcaaaacccctagccagtgccgagtatatattaggtgctcagtataacttagctattattagtgttcctaacaagaaagagattctgggccaggcgcggtggctcacgcctataatcccagcattttgggaggccgaggcgggtggatcacctgaggtcaggagttcgagaccaacctggccaacgtggtgaaaccccgtctctactaaaaatacaaaaattagccaggcgtggtggtgtgtgcctgtaatcccagctactcgggaggctgaggcaggagaattgcttgaacccaggaggcgaaggttgcagtgagctgagatcacaccactgcaccccagcctgggcaacagaacgagactccgtctcagaaagaaaaaaagagattctggacaccctggaccactgaaaccctgttgtggtggaaagagcaccagagttttagttgaatacctggattcaaatcccagctctgctgctcactggctcgaagtgtgcaaaccctcaagtcatttcctcatctggaaaaggtggtcataactatctatctggcccaggcctggtggctggtgcctatagttccagctattcaggaggctgaggtgggaggattgcttgagcccaggagtttgaggctgcgatcatgccactgcactcctgcctgagggacaaagtgagaccctaaaatgaaaggaaaacaagttgtctccaggattgccatgacttgctgcattacttcagcaratcatcacaaatgcatagttagtacctgaactgaaggaatatgaataacaaggtgaccacaaggagaatggatggttgatggcttttgttttttctctyctgcttttagatcaccagaaactagaacgtgaggctcggatatgtcgacttctgaaacatccaaacatcggtgagtgcctgggcatggagcattttgtgggtattttgtagaagcagggataacagatatccactgcttttgtgtgtgggatcacctctgtctgtggaccttcacctggtgtctgtttttacatgagcaggatagcaactgtgtctcagaattctggggcattctagtttagagacctgagtatctgcatcactgcggcaccttctcagggctggggtgtgaggcatcagaataggtttcagatgctatttcttccctttctccttctgtctttgggctgaggtccagggtcctcagcgtgtgaggttccgggctcctagcctgccagcgtccctcaccaggggccatccacagccctcatgcaagggtcaggattttgtttgtggacctgaaagagttttgttcctgctgcggtgtcctgcacactctgggggtttccatggtgctcccatttgtattccccagagccaggaaagcaagctgcccccctgcctggctcctctggagaagggatggcaggaaccactcagatggggaaggagaaaaaagaggatttctccctgctcccaccctgactggggggacaagagcacattgttggttgtgctaaagcctgaggaggtttgcctgcctcaacccactctggctcagttttactttgttcagctgaaatggtctttgccaaaagcgttggccctgatttggtgctccttgcagaagggacagaaactgggctggctgcagtgtctgagcagaagccccagtgttgacttgaggcagagcaaggagcatctcctaggttttccctgaaagccctgagtcatcacaaaagacaacacgtgttctgtgctcctcaggcatggcctaaatctcagggctcccaccgtgccccagaggtcgcctgctctgctctgttggcggccagggctgtgaggtgacttgctgaagcctaatgcttccttcagagctacccagcccctggcttcccaggtctcgggctagaacagtcaaagtgagctctgtcatggaagggctgaggtcctgctctagccctctgggagaggagcagctctgaggtagtcagaacgtcagctgtgcagggctttctagatggcaatcagcagcttggattacacccgaagcagattggtgtggccagtggtgatcggctttgcctgatgcagtgtgttctgcagagccagcacctctcagctggtgggttcctggccgcagaactactggagctcctaggtggtttctgaggttaggccttcacctgaaaacagcgcagtggggactgacatgttgcctttggtaggagagggcccacagagggaaacacctagaacagcagtcacagattaggcatgttttgcttggctgacycagtggtctaaaaatatttttattatttgccaatatttaaaaatgagatttcacattttgaaaaaagaaaaaatctattcccccgcctttccagtcagaaggcttggctctgctgagcccccaccttgcatggccagaaggagctgtgaggagcggtggctgcccctgcagcccgctggccactgtccttgtcacccactatgagctcacatttgcattacccacctgggcccctgtaggccttgcaagcttgtgacctctaacctagaagttccagaacaggaagaaaaaacatgtgcgtgactaaagccacccataagcacagaagcattttgatgttccagacccgggtctcaatatctgaggagggtaacttcctttcctttatgctccttgtgaccaactggtacagcagtgataatttgtcctcatgtaggcaggagaacagcagctaggggtcagtgatgcaggaagcagaaccatgtccacatcacccgcgatgcgggcgggttgaccatgggcgggttgaccacggatgggttggccacggacgggtcagggtataatgaagacaattgagaaatgagcaggaaggacaaaaatagaattctaggtgaaaaaagccctaggtgtctttttatttatttctagaattaaatacatacttttttaccccatagacttcactctgtttggtagccctttacttttaccatctgccctcggctcagaatggaggcaggcggagggaccatatatcctggccgtctgctcagaggccaggtggggcacagtcactcttttggcctctgatttcctagaactgtgcttccatttcatgactgctcccaggtcctaaggaggttggtccgaggaccgattctggggttgagggtgggcagagggaagggggagtcaagactgtgtcctgggagctccagcatccggtgggaaccagggctgttggagatgtggcggagctgcaggtccaggcggctgtggttgccatggatctggacctggcttgtggcaggagaggaggcaattttgtgcccctaattcactattcctcttctctctccactgcgctgtccttcagaactgtgacccttttggctctggcctcttgaactccatcccaaagggaaacaaacgggccagcccaagaacagtgcacagtcgaggaagctagagcaaagagcatgtggtcagccctgcctgtggtcagactcggaggcactgaattcagatggagcatttggtgctaggggccagtcatgcccagtttccccttaatagctagatattctgtcccaggagttaaaagcctgttggaagagtgaaccctgatataaactctggactttgggtaatgatgatgagtcaatgtgggttcatagacggtaacaaatccaccactctagtgggagatgttgatggtggaggagactgtgcatgtgggggacgtggggtatttgggaatgttctcgggtatttgggaacaccctgtactttccgctcaattttggtgtgaacctaaaactgctctgaaaataaagtttattaattaaaaacaaacaaacaaacaacaaaatgcctgtttgggtgtaaggcacactgccgaactccaaacagcgctgggagtgtggccagtggtggggagttgagaggaggagacgctggtgtgaggtctgaggtctgaatgaagtccgttctacctgtgatctgcctgctccctgctctcaagtcctctaatgaatagactctgtcttccttcgtgctgagctgccccagcagtttcgatcatagtctagcattgtggtttagagcagcacttctcaaacttttatgtgcttawgactcacgcagggatcatgttaaaattcagattctgattcagggggtctggggtaggacctgagtctccagctgatgctcatgctactggtccgcatgcctgtcaatacttggagaagccaagttttgcggcttcggagtcgcatccagatttggggtttgaatctgggatttgctaattagtaactgtgacctctggcaagttatttaactcctctatgcctgcctctgttttgttatctgggtcccttcgtggagttgttatgaaagggttcagccaggaaagggggctaggagggagatgatgaaaatggagattccagcccctagaagtgatctcttcaagacccccagcctcgactcagttcacaagttattcaagcctgaccatttacccttgagcccagtacccattcagctaacagtaagtgtagcaaagaaacggttgcaaataaaaagaaacattgaatcatgactgagcagttcctacatccctgcccccatggtgggggtggggggagccctgccacagtaagctcttggggggcagctcagtcccccacaagcccccatggcaacaggacctccttcccactgtgttattgctgcagatatttttaacagcaacactttttcagtgctttttggagaaagatttgttagttaaaatgtggcatattgttgggtggtttttaaagaattggaaatagccacaacatttgggttgtggctatctcagtccttgaagacatgaaatatcaagtaaaggtttgtaggtgttttggcctgttctgtcttccacggtttttaaagaacagcaattaggtttgttgctgaaatgcagtaaatgctttatactcctttccccagatcttcctgtctatggacatggcctggcccttgttggccttcatgccctgtctttactctggaatgggctgggtgtcagattattttattccacgcatccatagtccctctgctcctgcctcacagcatgacacagttgtgcttagttaacgcatttgtgtaattgctggtttaaagcctgtcttccctcttcgcctggcagctccaggtggcagggccggctcctcttcttcacagccacatccatggcatgtacagcctcgcctgctccggggtagctgcccagtggacattgtcgagccagtcagaatggccacaggtagtggggacagattggagctcctttgcctaagaatttgagaaggtgactcccaagcaactctgcaatatcaggaatcttgatgttggtttgtcttggcttcaagtcccggttctgccacttagtgtgattttgggcaggtttcttatggagcctcagtttcctctcctgtcagatggggttatttatatgtaagtagctaccctgcagagctggtgtgagggttcaatacagtaatgcacgtggagcccatggaacgatgccggcacacggacagctcaactaagtgttagttgttagatttagattgttattatcagaatctgatggggtgcggtggctcacagctgtggtcccagcctctcaggaggctgagacaggagatggctcaagaccaggatctccagcccagcctgggcaacatagtgagaccctgtctcttaaaaaaaaaaagaaataatgaatctgctgttgctaaataggcacttagaatggcacagtcatttctcctcttgtcttcagtgtcctgttaatttctttacaaattaaaaaaatgtcgatagcagtcttattcagatacagcttcctccatccctccttgtcttggcaggtgccttgctctggggcacacatcaaagctgttctctctgctgggtggcctaraaggattagtcttcctttgctgctcctttcttctaattcccttccccggcttcctcccacctgggctctgtgtgtggccttcctggagaagggcagacgccaatgactccatgtctaggcagaggcctgggtgcctgcacttcttgccctgttcttggccttgctgtgctgggcgggggcagggtggtgtggggcatggggtggtgttgggcatggggtggggttctggctgaggcagggctcagtgccaggcccaggcagagctgagtggctccacttctctgagatggttgtcagcatcatacctgctgctgtcccgttaattccccatgctgctgctgttagtcacctccctaatggagctggtctgtagcttctgggacagctgatttccaggggattatttgtattacacactttaatgctttttaatagcaaatttttaattaaatggaaagtccttttggaagcgagggagcagcagctgcagcaagactcagcgtgaggcaccgacttagaccagaggtgcgcaagtgagtggggcggaggcaatggcaggacttcgagaggacttgattgagtgtatatggagtgtgcccaggctaatttttatgggaggaaggcaggggcctggcgctggctccttcctcctgtcctaaaagccccctctgtcatctgcaggcctagggaagcatcttctttgcccaggagagaatgtatattggatatatacattatatccaataatgggagggatattggaagtatcacctgcctttgatcccgttcccagaaatactgagattgggatgggatttttggggttgagtcactagattagatcaaatagtgtaggtaatgggatgcggaaacagtcttgaggccctggctccggccctggcaggcttcggagtcctcagtcatcaagggaggagaacaagggggctatagtggtggttcagtgcctcgggactgtgccggctgggttgtatactttgctttctgaatgatcttgcttcgtggggaggggacatagggaagcacctcagccctgaggaaacgtgtgacactggaaatggaagcagccagggcccacccaggaagagacatggccatttctttgtctcctagcactgaactggttagtttggtgtcaggccattcctgaagtgctccatgaggtgcacctgtaactgccaaggcttggagcaaaggtcaaaccgagggaggcctttggaacagaagttccccatcaagagagttcacgtgaggggagggacaggacagtcagccaaagcggagtcgtttctgcattagaatgatgctcaggggttggcatttaacccagaggtggctttgtgggcagaaacttgaagaggagacctcagaagacttcaggttggttttttacccaagagctttggaggcggggagcagggagggattccgcctgccagctttttctcgcagctggtgcatcgcccgagtcttcttccagtggcaccctcccggacctgtctgcgatgctgctttagggacatttgtaagtggtctttcttttggatgccagggctttgttgcctgaatatgggggctgccccacatttcttaagggaagcagtggtgtagaccacagtctttggagtcaggtagcactggattcacatcttgacccaccacttagaagctctttggcctttgttaagagactttgtgtccctgagcctctggtgccctcatctgtagaatgggaataacattcatctcaggtggtcgaaaggaataataaactcctcaaaggcaggcactctgtctgttcctcctgaatcccgctgcctagcgtggggtccagcacatagtaggtgcttgataaatgcttgcagaatcagtaatgtatgcaagagcctagcacaaggcctggcatagtaagcacttaataagctgttattgttgtcattgcctgaatgtgtgcgtggccttccaggctcaccatccattatcctgcaccacgtgccttcctgctgagctctgcctttccaccttcttccccaccccttagttctgctcccatttactgctctggaagagctctctggctttcccatctggtcattgttgtcccctgccgtcaacattgctaggtgctgctcacgctgcatctcaccatcgtgcatcatatcccaggaccaccttctcggagaccagccctctgggaaggttccggcttttctccatcttgacttcttagccatgaagcttttctctcttgcctgagtctgaggtggcaaccagagcgccaggctctggctcccaggctgcatagccttgcactggggggcactgggcacgtcgccacttccccccactgctccttctggagagccctgtgagcccgacaggatggggcaggggtggggctgctgaggagaagcctaggatttccaagttttctctstgttaatctctgtccccatctcctctcttgcagtgcgcctccatgacagtatttctgaagaagggtttcactacctcgtgtttgacctgtaagtgccactttctgagggtgtgggggcctttccctctagctgactcaaaatgaaggctcaggaagrggcctaaacaggctctccagcctccgcccagggccccctcctttgtccgagggaaaggatttgactggrgcagattgctgcccccaccaagggggtctccatgttcccccagcgtccccccagggctctgaaccccaggacagcattcctctcgcacttctgttcagcagcacgccttgcacagatgcctttgtcttgtttctcagtgtgctgtccttagtgaagaaataaaagacagctctttgcatgaccttaaaaatcctgagaaatcagaggtagctttcattagtcggaaaccaggctccattggattgggtctctcctccacgttggttgtggtttaatgtcttaaaagtggctcttacctcctggacactcctctccaggattctcagggttgggtctctgtgtcattggtctcattactcttcaacttcagtagtagctctgtccttcctgggcagcgatattttagtgtttatgttggtctcaaagctgtgacttttggggtaggttgactgttttctcttagatccctgtatcttcatctctgcctgactattagtgaatctgtgcattttggaaaaagaaatgtccggaaggaagggacggcccatgatacctcaaggagaatccgggtgtcactgaaggatcragtgtgttctgagctctcagatgaaatgcatggggagttgggatttctctgaaagccattctacagggtgaccctgtttcttcttggacattggggttggacaaaggaccctttctgcctctgaccctcttcttcccgttggttgcagtgttaccggcggggagctgtttgaagacattgtggccagagagtactacagtgaagcagatgccaggtaggatgagggcccgagagttcaaatgtagctctggagtttaggactgaaggaagtcttggccaccttcggggtccagcattgtacctgtttgaatagtctttggggaagatcagaatagctcttgtctggagaaagattctgttgagctgggctagggcttgcatactgtgggtgatattagaagttaaaaattcagcacttcctaaccaggcgcagtggctcatgcctgtaatcccagcactttgggaggctgaggcagttggatcacctgaggtcagaagttggagcccagcctggccaacatagtgaaaccctgtctctactaaaaatacaaaaaaattagccgggtgtggtggtgtgtgcctgtaatcccagctacttaggcggctgaggcaggagaatcacttaaacctgtaagcgaaggttgcagtgagccaagatcatgccactgcactccagcctgcgtaacagagcgagactatgtccccctcccccccccccacaaaaaaaatcacttccaaatgaatgttttacaaagcttttccaagtctcctttaccctgtgaccccagaaatactttttttttgcactaccatgtactcgccaccatgcccaatgtccccctctgcccttttctttcctttgacaaattctggtgtgctcaagccactgtgctgaggctctggcatgatccagaggtgcagaagacatggtttctgtcctgagggagtggagagttctgggctgataatccaaccatagagccccgggagctttcagcctctgtcaccttgtccctagaccaccatgaccagccttgccgtggggctcctccaacttgaggaccgttccccggccacatgcctcagcctctgccctccctggaatccctggtgcctccctcacccacgctctcaggygcctgttcagcctgcctttcccgccttggctcttcccccagccttgcttttctcgagggtgatgtccctacaacctggttttgatcatcctgcctgcagcttatctggcttatgtggcagctctggctgcttctggagagtgggggagtgcagcttcctcacgaatttctcaaccttgagaggccaatgtttgctgatcaacttcagatgcttcagcctcgggaagaattctcaagtggggagatgaattccagtgccagcaggggaggacgaggctctgggacggaggaggcagtgatggctcagggagcctgcggggaggagggagagctatagggagggggccctgagggggggtgactgtaccagtgggcttggcctggctctgctgggacacttcgcacttttgccatttttggccagaaggcgctccctgctagcccggctctgttctaattatacatctctgtggagactcgcctctatagctcagtcttaaagtttctgtggcccactcttgggctgtgtcctatggggaggcccgagtttcagcccccagggacccagtacgaccccttggttcttgtggcatccccagcatcagattttaggaatagtaagtccaggccacccagccccatacactgggatgctctgcagatgtgcttaatataccagatagtgcctgatgacgggggtctatattctaggccaagttcctcagccttggtgctactaacgttttaggccaggtacttccttgttgtgaggcctctcctgtgcattgtggcagacatttagaagcatccttggcctctgcccaccaaatgctgggagcacccctcctccagttgtgacaaccagaaatttctctaggcattgccaaatgtcccctgcggtgggggggggcgggcggcaaattcattcccagttgaaaaccactgctctagactgcccccgctccctgtcaggagtttgatgacagggatggcaggatggtttgctatgtggacagtctgatttacgtgtgtgactgtggctgggcgcagtggctcacgcctgtaatcccaacactgagaggccaaggtgggtggatcacttgagctcaggagttcaagaccagcctgggcaacatggtgagaccttgtctccacaaaaaaatacaaaaattagctgggcacggtggctcatgcttgtggtcccagctactggggaggctgaagtgggaggattgcttgagcccaggaggtcaaggctgcggtgagctgtgttcacgacattgcactctaacccaggcaacagagtgagaccctgtctcaaaaataaaataataaaataactttgggtttttttctctacgcaaaatcatcagaagtgctccttaaatgccctgtttggaagctcttaagtacattgtttcttaaaggtatctttgtacttgttttagctgccttactggatgccagacctcagggcagctattgggtcttgtccatcttcattatcctaggcactcaataaacatttagggaaatgaatgagtgcacccaccgccaaagtagcttaggttgtttagttggactctccttcctaagttgccagcacaagcttcttctccaagaacaaagttactgtatggagaaagagaaagaaggaagggattggatgctctcttcttcctcaggattctgggctgtctcctgatctcttggaaatgagttggttgtgttagacctttccagtcaaaagggggtgagaggaacccgttctagcggtgatcctagaaaaaccattgcatctgcctgggcctcggtttcctctttctttaaataggttgaacaagatgatgtgcagagtctaaggttccagtggccgttaagtgattctctgtgaatccgtggccccttgtcacatgccttagtctgcagcatgtggttgtggatgtggatgaggtggtttaaccctgcgctaacatttcttttccttctgcttttttagccactgtatacatcagattctggagagtgttaaccacatccaccagcatgacatcgtccacagggacctgaaggtactacccaggctcccctccktgcctctgctcatgaagtgttggcgccacctggtgccagatagtggtactgcgtaggcccaaactaggcttcctctgggctgcagggtgggtgctcacaaggttctctgtgtttcttctgcagcctgagaacctgctgctggcgagtaaatgcaagggtgccgccgtcaagctggctgattttggcctagccatcgaagtacagggagagcagcaggcttggtttggtaagggtgatcctgtcttcccggaatgcagcccccgcccttcctcctcttcctgatctgccttcctctattagaactagaagccagacccttaatggtcctggcctccgagatctctcttggccgtacgcgactcagtacagtaagtctagctgttgtcagcactgctttcttgctgcctgtgggaaggagctggagttcctggtaggcatacggctttgccgtctggttcagattccaggcgctacaagaagcccagcctgtcagctcttgctgcccatgtgctgagagtttatgtagcaaaagcagcaggaataagatgggacttgggggaaatggctggtgtggatttaacgagagagaaagtgggttcagtatgcctctgccctctcttttgctacaggttttgctggcaccccaggttacttgtcccctgaggtcttgaggaaagatccctatggaaaacctgtggatatctgggcctgcggtaagcccattccacgctctcagcttttcgctgttaagggccctcaacttccgatgatggcaagaaagaggcatcgctattccttgcaggtcacacaygtgcctggtgtatgtgaaattatggtgtttgcccctgggatggctgttcccatcacaccctcctccctgcgtacttctgggatgacattgtatccttcttggagagggatttgcccacgccttagaggatgggttgtgcctaaagaaatccctggtgtgacttggtgacgtgaagtgtgaggcatagcaggaggggctggtagcatagcattatcggctggcatccacttctgactctggtatggcccctgcctttctaggtggctctgagccctgcatggtttttcttggttcctcagggaagtaggcgactgacccccatgacctgtgtgttctgtctcgtaggggtcatcctgtatatcctcctggtgggctatcctcccttctgggatgaggatcagcacaagctgtatcagcagatcaaggctggagcctatgatgtaaggaccagagagccgggcagccaggccaggaagggcagatgtcctgctcctcgggctctgtccaagggagcaggcttgtttagtgtgtcacgtgatacgggggtgtcaggggactttgaggacccaggaatgggcatccagggcccaattcttgccactctatgtcccagggagcaactttcttttgcacagccttcttcataactaaaattgaggagtccactgaagtcctttgatctttacttgcaaagaatggagcggcctcattggtgtgctgtgtaacacagggacaaaaggcctggagactccctccactgcagtggcaccttggacacattgctgagcctctgttccctcctaagtatagagctgggcttaaaccagagaatgttggagtccccttcccgctctaatctgatgttctggcattctaaacatgactgttctgtctgtctttccaagtctttaagttgacacaggttctggaatagccgcagggcttctccaactctgccagtcacagctttaggtaccacagagtatcccaattacaggagttgagttgaagacagarccagtgttgcagggtatgaagctcaccaataccacattcttctccctattcctgctccttagttcccatcaccagaatgggacacggtaactcctgaagccaagaacttgatcaaccagatgctgaccataaacccagcaaagcgcatcacggctgaccaggctctcaagcacccgtgggtctgtgtaagtgtctttgctagtggccaaggagctcaggggtgtcagccttctgtgtgccctcggcaccaccccctccttcttaccagcagagattcattctgggccccaagcaataactgagcaggcgggcagaggactgttgagggccagggtcaataaatgtcaccagggagactcgggaggctgatggggctggtgggccactgctcctctctcccccactcatggctgtcaggctgggattggttctgttcttggatgagggctcaggttgacccttgtggactccaggtagccggtgatagaaagcagctggcaaaacccaaagtgaattcccaagctggggttcatactcagatctcaactccactggagtggtgaccaagatccaacaaatcaacagaaggggtttctgagtcattaaaagcataaaagctgaggcataaagcttctgcgctaaagtcctaggagagtcctctaggctatcagtgtgggttgacgtactctgtttttatacacaattctttcaagctgaaatatcaactttcagacaaagaagaggatttggtagagttaggcatcttgacaaccacgaggcattatttatctgtccattctgtgtttattaaatacctctttggtgctggttaccgtctgggtgctggagatacaaagatgaatgaggcatggtccctgccccaaaagatcatctagggagacaggcactcaaacaggcagtcatgttacaatgtgacaagtaggtacaagaatctaatgagagtacaggagctcctactgttcctggtgggtggtggggttactgaaggctgcacggaggaggtgacacccctgtgcttgttcttggcaaataacgaggtcctcagaacgttaacctgcagacagagtttagcacagtgagaggttatgggaaactatggtgagttgaaggaatgttgagttgtttggttgtcgatgaggctgcaaatatcagaatgcaagagaatggggcaaaagattccctgacatacaagtttctgcctcaggagtttggattttattctgaaaacatagggaatcatttaagggttttaaagaagaatgaaatttgcatttaagaacactttggaagttgtgaggaaatgaattgccaggcatggtggcatgtgcctgtagtctcagctgctggggatgctgaggcaggaggatcataagcccaggagtttgaggctgcagcgagctatgattgcacctgtgaatagtcattgtactccagcctgggaaagatggtcagaccccacctctttaaaaaaaaaaaaaaaaaaagaagggaattgaaaatttttaaaagamaagggctggagacagagagctcaggaagcttttttaatagttggaatagtctaagcaagaccaggtgaggtctcagcagagggtaaggatgggggaatgtgcagtgtgttgaaattcaagagatatttgaragaacctaaaggatttaattctctccagttggatttggggggagcaaagaagagagaggccaggtttcaagttgagcggagagttgtaccctcactgacccagaagaaaaccagaggaggagcttgtttgtgagacaagacgatggttttctctttttttttttttttttgagatggagtctcgctctgtcgcccaggctggagtgcagtggcgcggtctcactgcaagctctgcctcccgggttcatgccattctcctgcctcagcctcccgagtagctgggactacaggtgcccgccaccacgcccggctaattttttgtatttttagtagagatggggtttcaccgtgttagtcaggatggtttcgatctcctgatctcatgatccacccgcctcggcttcccaaagtgctgagattacaggcatgagccactgcgcccggccaagatgatggttttcattttgtgcctgctgagtctggcaacctccagccagacacattcagtgggtggttagaaatatggtcctagagattagaaaagaagctaaaaattggaaatccacattgtagtcatttctgtgtagttggtagtgaggctgtagaaatagcctcttcctatgctgtagatgggcctgttcctatgctggttgagttcttacggtgagcttctattggctgtagtagagaagagacggccactacacaccagcatttaatgatagggagagttagggggcccagcaaagagcactgagagtgagaccttccagaagacccagaagctaagaaacagggggtctcagtaagggagcgtcaggaatcagatgcagaagagtccctgattaagttggggaagaatcccctggctctgaccattagatgccattgtttcatcatttcactgagacagtggagagaaagatgaaaccctgttttcagtgagacgaagagggagtgagggtgaggaggggcatggggagctaggcattgaggtgggaaataaatggtgatacttagattaagatgggccaggggagcttttaatgtaaggctcacacctgtaatcccagcactttgggagaccaaggcaggcgatcacttgaggccacgagttcaagaccagcctggccaacatagtgaaactccatctctactaaaaatacaaaaaattagctgggtatgttggtacacacctataatcccagctacttgggaggctgaggcatgagaatcactagaacccaggaggtggaggttgcagtgagccaagataatgacactgcattccagcctgggtgacagagggagactctgcctctaaagaagaaaaaatttctttttaaagattatattggtcaggagcggtggctcacacctgtagtcccagcactttgggagaccagggtaggtagatcacttgagcccggaagtttgagaccagcctgggcaacatggcaaaaccccatctctacaaaaaaaaaaactttaaaaattagctggttgtggtaacgtgccttagctacttgggaggctgagatgagaggatcacctgagcctagagaggtggaggttgcagtaagccattattgtgctactgcactccagcctgggcaacagagtgagatgctgtttcaaaaaaaaaaaaaawtttttttgtttaaggagaggcttaactataatctatagagaagaatctagtccagaggaaagagttgaagatccttgctaattgaggaagcaaaggtttggacagcagaaaaagagagggggctcctgagccaagggcagggggtccatcccggggatgaccatgatccccctgagacttctattagtgtggaggcaggtgaagatcggcttgtgagtggaagtctgagctgaaaggggttcttgctgatgacctctcattttgcttttggagaaatttacaccgaggaggaggtaaaatgagagacttggggaaggtagagaaggtggggagagttgcctccggacctggaaagagtgggccaagggtgagggaaaggatgcgaggaggccccgtagtgttggtgggcacctggctgcaggtgccaggatttgtttttctgacaggctggtgaagacagcaacagcaaggggagagggcaagcaacctgaaacaggcacccaagaatgggggaartattctgttctggggtcatttttgcaggccctaccctctgcagtcccgtgtgtctcgagcccctgaggacatcactatattctgaaattacataatgatgctggtattgacagctgagtcattgaggaagtgtagactgtgtcccatggactctgtttaaggaggccaggaagttagcagtaaatacattgaagacaaatttccatccaaaaaaggcggggcacagtggctcacacctgttatcccaggactctgggaggccgaagtgagcagatcacttgaggtcaggagttcgagaccaccagcctggccaacatggccaaccctgtctctactaaaaatacaaaaattagctgggtgtggtgggatgtgcctgtagtcccagctactcgggaggccaagacaggagaacctgagaggcggaggctacggtgagccgagattgcaccactgcactccagcctgactgacaaagcgagwctccattgyaaaaaaaaaaaaaaattacatccagaatgatgaaaagaattgatgcttcaaggtgacgatccttagcttctgggatcatggcttcattcaggaccttgctgggggtgtgtggagaggggctcttggaaggaaggaatgtcctctgtagagagcaggaaccctgccgttctctcgctgctgagcatctggaacgcagtaggtgctcagtaaacagctgcctaaggagtgactgaatgaggatcacagcccccagggtactctcctgttcggtagcctctgtttcccaaggaagaataggacggtctctcagcagcccgtctagcatccgttatggtgttctcacgttcatgttgtccttatgtaaccttgagtttcgggtagtgcttttattctaaaagcgttttcacatctgtgacctcatttcatcttcagagcaactctggggtggctgagtgcatgaccctgtcctgggcatggtatcggtgccaggactgtgggaggcgcagaggatctgggctggggctcatagcctgtctgtttggtttctagcaacgatccacggtggcatccatgatgcatcgtcaggagactgtggagtgtttgcgcaagttcaatgcccggagaaaactgaaggtgagtgtcgtttctaggctgccagcctccttgacatcatgccttgcaccagtgtggctcctgccccatttcagaaggaagctcccctcctggctggagctgggctctgaaggttgtacatgtcacaggggagggggcccagaggcctgatgtcttcaggctctagccaggacctgcctttgcctgagaccagcctgcccttttctagggtctcagtgaattcacaggaccttcctctttccccagggtgccatcctcacgaccatgcttgtctccaggaacttctcaggtatgttttcccagctgtgtactttgattatgccgaggtgagtggatcaggaatgggctgttgccatcccgggcaccgctgggtttcctcggcgtcctgggccacaccttgaccagggcgagtgaggatcctgttttgaggggctgctgctgctgctgagtcctgctcctgagattcagggggctggactcacatttgtgaattgtttcctagaacttcccaaggagtagcctgcccarcttgctatgtaccttgtttctctggattcttattwaactctctgaagactctcagcactttacagattttagccattctaggatcttggagratgtgctgggggaagaaaagagagatgaggtacagtgagtcttctcaattgccaaattgccaccattcatttgcctgctgggacgatctcttacttcattttgtccaagtggagatgactaatagaaattattccagatgtttaaaccttttgtggcgacttgtgcttaaaatagtccctgagatactagctataacagtgaagaaataaagaccagcaggagagagggaaaggaacttgcttaaatttgcataaagaattgggagaggtgggaccaataatttgtaaatcatacttgacatttatttttaagatgcaagacactccactcccctcttgcccccaccctcaccccaacccctattattgtttgccttcaattgggaagcacagtggcttttttgtgaggaaaagattaatgtcgagactgaagacagagagggctctgcccagcttgccatctcccccggtcctccctccctctaaccccttgcctcactgttttggttcaagacccccccttctccttcccataataagactccctcccttgcttcccctctgcaccaccatggaaagggggttgtgtgggagcmtaagccaccactcagtgggagccacttctgaatacccgtcctgctgggctcgcctgcgctggctccaggtaacgccagggccttggctgtgaggatgctgcaggcagggagcctagggcttcgtggtgtagcctgagagccatggagctccggaaggccagggctggatagtgagcccggggctggtggtgccctgccctaggccttctcctttgaccctggtttggggcttgatcttgtgtcatgggtacccacgacgggcatactgtggtgtggctccacctctcgcagatgggaacagggaagcgtggctggctgcctccggtggagttgcaactgtagtcccacrcttgcttcttgtgctttaatgacgcagcttctactttttgggtctacgagcctttccagaggacattgaagggcgtttcggtgttgcccctagagcgaagctctgtcctctctcccctctgagttgaagaaatgtgaagacagtctgctgcttctcttttagcccagccagtcaatagcaagggccctgtcttgcagccccgggcctccacatcagcctccccctccatttcaggaaactggcatcctggtttcaggaaatcgggtgttaggacaaagcattttattcatccctgtagagcctcctgttcttattggccagacctagactggcctttgagctcactttgccttgggtcagaggagacaaacaatgttgcaagcattccaggatggcctcttctgccctgactctgggacaggtgaggacagagtctgtccggaagcttctgcagaaagaggtgtctatggatgcaatcaagaaggaagggcacctgtgtgtttctctagggctgttttttgagttgacctccaataggagatgtggcttatcctggactctagcagtttggctaacagcgaatcggggcctccagagtgtattgcttcagcagcctttgttttctttctcagggtttatttcttgggcacctttcacctcagcacactgtgacacacagactgagaatgctgcctctctcggctacctcccttaagacagggacctgtgtctctgaggggttggggggcatggagctggggcccaccagtaaacttagctgcacaagggccacagaccctccctgggacccccacgccagtccctctagtgtgtgggatgtagagaggggagagggctgctctgcgcccccggcactctcatcgtgggctcatttagcttctagggagggaaggactagaagggagggcgtttcatcacagccttaagctagggccgggctacctcagaaggggcacctgcctctcaccggctcaggcatttcgctgtggaccctcctccggagggggtcatgagacaggcactgcagccctctccatctggtggggacgcagtgttccctatgccctggcccagcccggtcttcccaggcccccagactgctgcagggctggctgcgcctacctcctcagcctgcccctggcgctccgctcccccagctcggctggcttggccacgccgcctgggctgcgcctcgcgctggggcatgctcgctgctgacggccccgtggctttgcggggctctgtgcactgagagactgtatcccctcagttggcaggcagagctccgcccccgcctcgcctgccgcgagcgccgccggcctggccgggcaaggtacgtggcatgagtcctccccgaccgcctgcctcggccccctgccaccccaccaggagggccagcatgccgggcccactcaccagggaggcgagtcccatgcttgcgggctgagatgggcatgccagacagactacctaacttggcatctgcaagcgcatcgttgttayggagccccctaaccagccatgcatgctgggcgcttgccaactttcagggggcagtagcctgggggcatggagctgggcagcgggagccttgccaagagcccgatgccctgggagggctgcagccaacagtgggccctcagagacagtgctgggcattgccctgagctgcccggtgctaggactagatttccgcagcactgtttaagaccccacagaggagccgcgctcctcaaaattgtgaagtctggcgcttgctggcctccaggtctgaaaggctccagagtgcagaagcctcagagccagctgtttctgggttcacatcctagccctgccacaccctgagcgagtcacaccagctctcccagccttaattcctcacctctccaatggggatgataaataacatggtggtgcttaagatcaccctgtcgaaggctctcagccctgcctgtgcagtacagctgttacctgggagctcgtaagaagtcctaatgccaggaccccaccccagacaataaaatcagacccttagggataagataggtagtacgctttttttaagctcccaggtgatcctagtgggcaaccagcgttgagagctggctggtgaatggaaagcacttagacagtaggcggtcaggcacaggagtcagcacatttaaaaaacaacattcaaacccagcacgacaagataagatcaaaggtctttttctggagtcagaattctcgtaatggaaggacccctgttctcactggagagagatggaacacagcttggggaggaatggctacccaaagggcaggagggtggcagcaatagtgacaacgatggtggacacttactsagtacttgctatatgccaggcactctaagtgcttttcatgcataatcccactggattcccaccactgttttgtgatgtcagccctactttatcccattttatagataaagaaattgaggctcagagaggttaagtaactcaccaaaggtcacacagctggcaagtggtggaaccaagatacaracccagggcaggcagtccaggtgtatcagacagttgggctgattccatctccctgtgcctcccagactctcctccccactgtctgctaccttcctgtggccttttgtggccagctggtgtcaccagccttctggcacagagctcatcagcctggagcgtcaccctatgcctggctagaatctgtttgacagctcattattctgccgagtccttcctgctcacaggtccagagagtggacactggggaaagggtggcagctaggacccagtgaacctggtgaggacctgctcagtgaaggcttcaaccccctggcaaaaccctcctgtaggtggtcctggtttctgtgtctgtgtctgtctgtcctctggtctcctgtgtgaactgtgacactctgcttcttgagaacactcaggagatgtcttgcatccttgcagtttggccatccagagaacttccatggcacctagggatggagccctcactctttcacccyggcactctgcttccaggcctgggtggaagctgtcaaaggcagagtccccagtgccccasgcggctccagtactgagcatggyttctcctctaagtgtcgtgcatccatgccctcctccacgcagaggagatcctgaggtgccaccctgagggctctgacgccactcaagatccccttcttgctgagaggctataggaagtgcctcttttgggggtttcgggagacccttggcccccttgtcagacacagcactctcttgtggatctggctgccggacttcargttggggagagggtacaatgcaggagacttgatwttcctctttgttttcacagctgccaaaagcctattgaacaagaagtcggatggcggtgtcaaggtaagtgtctccagcctctgaacagactggcctctttctccccgcagtcactatgggaattcttggcacctggttccccctttcccagggaatcttcctatccttgctagtctgctttaaaccagatgcctttgtgctcagaacagaaggttctgctggcctgagagggaagtagggaggtatttttcctggccctagctggatgggaatgactcaggggaagtgatccaaatcatagtttataccagagctgaatccggaacctgacttctacacggatgcttcatctccagggcttgactctgggttttttaggtcatttggttatctttctttttttcctttttagagcacaaatccttttaatcaaatgaaagccaaatttgcctgagtgattcaggcagggtatagggcttggaacctgaaaccactctccttttggtctttttccttctctctacaacactttcagatcccactgagtgcaacagcctcgagctttcttgacgcataggctcctcagaaaaaggcaaaggccatggtggatcacggcttgttcccactgggtgagggagcttttcccatgggactggggcaagaggagggacctgggacccaccaggagccctgctgggaatggctgcttggccaaggtagaggagaggtgactggggctacccacagggcccaagacattctgtagatgctttgggggcagaaaggatcctggggctagggcattgggtaggagctcatgctatcttgaagcctcccagcttacactctagactagattttcactgggccttttcccaagatcttgtgtcaacagctgagatacacacacaagccccgttccctccccgttccctccccactccctcctctttccctcattctctgcatgcctgcttctgtgttcttccgcccctcgcaggggagcctgggctccgcgcacaccctctgacatggagctgggggcatcgtgcggtccccaagctctgcccctgagctacatggatggagccaggtgaggaaaaggggcaggtttagttggagagagtgtttaataagtacctgtcagtcagatgtccacgcagcattctgttctgaggggtacacaacagaggtgtaagagggggtgtggctttcagtcgccataggaagggggccgcacctggagtcagctgagcgctgctagtggacccacgcgagatggtttagtccaggaagctcataggagagagcgtactggagaaagctgcagggacataggtgagactcactttgcagttttactttctgctatatgttttctttaaattgaaaatatgggtcaggcttggtggctcactcctgtaatcccagcactttgggaggctaaggcgggtggatcacctggggtcaggaattcaagaccagcctggccaacctggtgaaactccgtctctacaaaaatacaaaaattagccagtcataatgaccggtgcctgtaatcccagccactcgggagtctgaggcaggagaatggcttgaacctgggaggcggaggttgcagtgagccaagattgcgccattgcactccagcctgggcgacagagcaagactccgtctgaaaataaagaaaagagaaaagaaaacaacatgacatttctataacttaaaaacaacaaattatatttgtatgggttctcttatacatattgatgttctctgcccagtgagaacacagggtgtgtggtagattgatgtcaaaaatatggttggatcagtcttatcaggcagaattggaagtttctgtgtcagaccatgggaaataccataggccattgagcagggaagctatggtgagagtgctgatagaaatgatttggcaagccgggtgcggtggcttcactcctgtaatcccagcattttgggatgctgaggcaagaagattgcttgagtccaggagtttgagaccagcctgggcaaaaccttgtctgtgaaaaaaaaaaaaaaaaattaactgggcatagtggtgtgcatctgtagtcacagctacttgggaggctgaggtaagagaattgcctaagcccagggagtttgagcctgaggtgagccaagatcaagccactgcactctccagcctgggtgacagtgaaaccctgcctcaaaaaaaaaaaaaagatacctgctgtgcccctagaagttgggaaggcaaaacttaatctaccttttaaggtgtttacagtgggagagacacaaggcagctactgtttctatggagtctgctaaggtctcagggaggtgtgcacctggcaggtgctgggggagcagacagataaacatccaaaccaggacaggaatcttctggaaggagatggccaggaattgagcttgagggagtagctggattttgctgggttaaggaggagacaggaggggagggatattccaggcagagggaagagcgcatgtgaagatacacgaggttgaaacagcatgatgattctgggaacttcagtatcttctttatggctgaagggaagagcaattgcataaaatgagacctgaaataaagcagtgactgttgaggtggaggggagaggatggaaaaggcaccattacagaacaggtttctagccaaactttctagatactactggtgtcaaagatgaaggtcatgtgcagccatgtaagattagcccaaggagccagctcaaaccatgcacatccagggcccagcttggaattcatrttctggaggccttggctgggaggcagaatctgtgaattttaaaaacactttcatgaatccaaagcacatgaaggtttaagagtctggtaaaggcaaaattttggggttatgtgttaagaaagggctggaacaagagtcggcaaaggaaacagaggaaggacagagaggtagggggaaaagagamatgtgcagcagctgcagctcttccaggaaccctgaggatgagggctgggcagacacatcattaggtaaaggctttaaatgaggacgtgcgtggggaacctagccctgcaatgtgttgtgtgtctgaccctgatatgtgctcagtaaatgagttttatgccacattcttttgagaaaagagcttcaatatcatggtgggaaccagaggccaatgatcacccaaaattaaaaggccaaccgcgtattcgcagcmgttgtgatgggaggggttaatatttttattgaaagagtttctgtgacaaataatccctcttaaaacccagtagaagctgggcgtggtggctcacgcctgtaatcccagcactttgggaggccgaggcgggtggatcacgaggtcaggagatcgagaccatcctggctaacacggtgaaaccccatctctactgaaaatacaaaaaattagccgggygtggtggcaggcgcctgtagtcccagctacttgggaggttgaggcaggagaatggcgtgaacccgggaggcggagcttgcagtgagctgagattgtgccactgcactccatcctgggtgacagagcaagactccgtctcaaaaaaaaaaaaaaaaaaaaaaaaaaacccagtagataggctaggtgtggtggctcacatctgtaatcccagcactttgggatgctgaggtgggctgatcacttgaggccaggagttcgagaccagcctggccaacatggtgaaaccccctctctactaaaaatacaaaaagtagccagtagtggtggtgcacgcctgtagtcccagctactcgggaggctgagataggagaatcacttgaaccttgcggggggcagaggttgccgtgagctgggattacaccactgcactccagcctgggggacagagcaagactctgtctcaaaaaaaaaaaaaaggaagatagatgatcaaagaaaataaactgacaacctgaaaacaaggaagtagaactggataacaaatgtggaaaaatttctagcctcactagtatcagagaaatgcaaattgaaacaaggtgccatttttggactctagttagtgatggtagtgaaaaccagaatggtcctttctaaaacagcctgtgtgtcaaaaccataaaaatgcttctacctctttttaccctgttaattctacttctgagagtttttcctaaagaaataattcaaaataggaaaaagctaaaagcagaaaaatgttgaacatgacattatttatagctgtggaaagattggaggctgggcacagtggcttatgcttgtaatctcagcactttgtgaggccaagttgggaggattgcttgaacccaagagcttgagaccagcctgggaaacgtagtgagaccccatctcttaaaaaaaaaaaaaaaaattagctgagtgtggtggaacgtgcctgtagtcccagctacttgggaggctgaggtgggaggattgcttgagcccaggaggctgaggttacagccaggatcacaccactgcgctccagcctgggtgacagagtgaggctctgtttaaaaaaaaaaaaaaaagagagagaagaaaaaaaagattggagacaatttgaaaagccagtaaggagccagacacagtggygcgtacctatagtcccagctactcaggaggctgtcgcaggacagaattgcttgagcccaggaattcgaggccagctgggcaacatagtgagacccccaactcttaaaaatgtttttaaatttaaaaataaaaagattttttaaaagccagtaaatgactaaataattatgggaaatctacttaataaactattcaaaagttattaattttcatgaccgtagggatattttaagtgaaaaataaagtgcagaaatgttttatattaagtgaaggaagtggtatataaaggagtacagacaagccaggcacggtggctcacgcctgtaatcccagcactttgggagcccgaggcagacagatcacgaggtcaggagatcgagaccagcctggccaacatggtgaaaccccgtctttactaaaaatacaaaaattagctgggcgtggtggtgcgtgcctgtaatcccagccacttggaaggctgaggcaggagaatcgtttgaactagggagtcggaggttgcggtgagccaagtgcgccactgcactccagcctggtgacagagcaagattctgtctcaaaaaataaaaaaaaaaaggagtacatacactatcattctaaatttggtttgaagaaacgtgtttgtagatatttattcagtatataatatgtggataaaaaagggactggaagaaagcccactgaagtgtcaacagtaacttcaccaggtgatgggaatttgagaaactttttttcttacacatttttctgtattctatatttttcatctagattgtgcactactgttatcagaattttttttaaatactattttttttttaaagtaaagcataataccaggtgtggcaactcatgcctggtaatcccagctacttgggaggctgaggtgggaggattgcttgagcccaggaggttcagcctgggcaacataagcaagactccatctcaattaaaaaaaaaagaaaagaggtaagacatgtgcttgtattattatatcttataatgatatctttttttttgttttttgagacagggtctcactctgtccccctggctggagtgtagtggtgtgatcttggctcactgcaacctccgcctcccgggctcaagtgattcttccacctcagcctcctgagtagctgggaatacgggcatgtgccaccacgcccggctgatttttgtatttttagtagagacggggttgcccaggctagtcttgaactcctgagctcaggtgatctgcccgcctcaacctcctgaagtgcgggggttacaggcatgagccaccacgcctggcctataatgatatcttaaaagattgctttctttttttttttttttttttttttttagacggagtctcactctcacccaggctggagtgcaatggcatggtcttggctcactgcaacctccgcctcccgggttcaaacaattctccaacctcagcctcccaagtagctgggactacaggcgcgtgccaccacacccagctaatttttatatttttagtagagacggggttttgctatgttggccaggctggtctcgatctcctgaccttgtgatccacccgcctcagcctcccaaagtgctgggattacaggcatgaaccaccgtgcccggccaattgcattttttaaaaagactggaagattgctaggagtattagtggttttcccatgccccttctctgttttccaaattgcttgtattgtggctgcagtccttttataatatgaaacaggtaaataacaacttatgttgtggctgcatcaaaggggtgagaaacgaaaaggagaggacaaagcaagatgtgcagagttcgacctttccaggctctctcaaagtcaaggttttgatcaatgttatgagggaggcctgtgaagtagctcagatggtcttgagctttcagcatcatggattcttcttttagatcccatcttcccttcccaactcccccttcctcaattcctactgcttaagtgtccatagggcgatttctttttcactgttcagaagctttctgcaagatgttcaaaatactagcattggtttgagcagctagtctgtcttgtgttcttgatttgggggacttagcttctatttagatttctttgaagctggatgccagtgacccagggtctatggaagagtaagagccacttgtgaggatgactgaagaggccacaaactctcagatcctgagagtgtaggacaacttgtgccttctgctagtcccaggccagaatggccatcctatctttaaaaaagaaagcaagcaagaaaaacgaaaggttatagttatttccctaagtactatttgaattattttgttaaattaagtatgagaaagaggtttgaacgcttttccagcttaaaatttaaaataaatatacagtttttaagtaaaagtgagatatgattctttagaaatcatctggcatttagccaggcatggtggtgtgcacctgtagtcctagctactcaggtggctgaggcaggaagatcccttgagcccaggaggttgaggctgcagtgagccatgatcatgccagtacttcagcccgggcaatagagcaagaccttatctctaaaaaaataataaaaagacctcacatttagacaatgtggtagtgtgctggttcagaaggagcccagctatgcatggctaagggcaaatccctgaatggagaaggaaattgaaaaatgttgactaacctgagaaacagtctttggaaaagggtgatctcaggttctcatgcaggacaatttaggaaaaagagagcaagccaggagaaggctgagaacttattccccattagtcaaaaatctgctttaagtcaagatcctgcaatggcctttcacaacaagcccctgaaaatcagcagaacaaagactgggcctggtgagtgagtgcctacgcagagttcttgctgccgtgattcagtgcaagttagaaacctgtgctcttctttagcctggggaaaaaccaaagtcagcaaacccagctcaactcagcaaactttcgtcgcctgtatgctaactataaggcatgttgctaggtactgtggaaattgtaaagacacataagataggaaccttcctgaaagcagtaacactttagttgggtaaagggataaggagatatacacacacacacacacacacacacacacacacacccccactacttatatatawgaatataagggaactccttctttttgagggatgattttcgaagtaaaatatcatatttgagcatatttaaaaggccactgtaaggctgtgtgcggtggctcacgcttgtaatcccagcactttgggaggccgaggtaggtggatcacctgaggtcaggaattcgagaccagcctggccaacatggcgaaaccagtctctctactaaaaatacaaaaaaaaatcagtggggcgtggtggcgggcgcctgtaatcccagccactcaggaggctaaggcaggagaattgcttgaaccagggaggcggaggttgcagtgagccgagatggtgccactgcactccagcctgggcaacagagtgagactccctaaaaataaataaataaataaataaataaataaataaataaataaawaaaaggccaatgtaaaagaggcctaactatatttaggtttttcttttcctttaaatctaattctaaattatggaccattgtcaatatttgtagcctctttcgttgattataataataatccctgaaaatgccttctaaagaatgctggcygcttgagggcaggagcagtttatcagctgtgtttacctgaaacagccctcagtgtttgctgggcattgttaaatgaatgtgcaaaagttgaacgacagacggacatattacagggggaccttacccccagtgagctaatgatgacattgataattacccttcattttttagacacagtcttctgggatatattttcagtgttccacgtggtcttcatcttgatgcgtctgtttcacatgtgaacgtaaagttcgtgagcatctagttgaggctgaggaatcactgctttcaacattccctgtggcttacatccctgcatttttatgatcactgtagttttaatcactggcactcctgtgtttctattttccacgaattgcaaaatgcaataaaaaattcaaatattgtaaacaagcatggctatactgacaaaggaaggccaacatttaactgctaggtgattttcaaaagctcagcatctttatgtaaaaagcatagtagggatgcagcgaagtcagaagtcaaattttattagagctgaggagagcctgtagtagcttttgctttttccctggtggctgctcacttgaatttcagacagttctagtaatgagagaaaataaataacattacagggtgagctaaccctatgaacccagacctgtaaatttgtagcaaaatgatacttaacctcacagacttgtgtcttaatctccttaagaggctttttttgagcaaggctgagacatctcagaagatactaaatctgtgtctatgaacctgaccacaaaagagttcttccctcccagggtctggagggtgtgagtgcctgtcggtccgtgtgctgtttaaccctctggtgctggactccgggtctccctccgctcttttctccctgatgcagagcccacactggtgcgctaacctgcagcgtctctgtgcttctcttcttacctcctctttccccttctctttccctcttgctgtggtgtgtccagaaaaggaagtcgagttccagcgtgcacctaatggtgagccttgcctgcccacccatcgcccactccatgctgcctgtgcccgcctgccagccacgcaaacctgttctgccacgtgcgtgtgcctcactcatcctcactgcatgtctgtgctgtgtgggcaggtgtggcctgtcctgccaggcgggggccattgcccaaggtcacccagtagcctaaaaagtggacattggaaggggtggtacggcaccccctgctgtggagcttggacagaccccagcgacccagggtaggatgtgaagctggtagggacttggggcaagcaagggagagaccctcactctcttgtcacccagaaggagaggccctgcttcccaggcatgaggagctgcttcctacagactggcagctggagggcaactgtgtggtgggcagaggagctggttgcaggctcccacttgtgagtctcgctctcctggctctgcccccgtgcaaatcccattctctctagctgtgcccagtggtttattctgcccacccagccctcgggggacagctaactcatctttctcacgggacactgggcaccaagggcaacacagcagcctgagtcattatgaaaccatccattaaaaccagaggtgggggccgggcgcgatggctcacgcctgtaatcctagcactttgggaggccgaggcgggtggatcacaaggtcaggagatcaagaccataacacggtgaaaccctgtctctactaaaaatgcaaaaaattagccaggtgtggtggtgggcgcctgtagtcccagctactcaggaggctgaggcaggagaatggcgtgaacccaggaggcggagcttgcagtgagccgagatcgcgccactgcgctccagcctgggcgacagagctagactccgtctcaaaaaataaataaaccagaggtggggccacttgggtgacatcccagccctctgcaggttttgtgggcaccctggagtccttgccccctgtgagggtcttggcctcagctgggatttacaggtagggcagccctctctaaccaaccccgaacaggtcagcatcattcactgagctaggtgggctttgcttcttggtgggaatgagagacagcagagctcccgtgagtttagacccaccgtctcactactcctgggccccctcttctctagcctgtcgcagtctgtggagtcttgttcagtggagtcacttggtgcctggcttgaggttccatgcctagccctgggtttggggatgtctgagccattgacagcaagctggcggtggacggcttcaggtctggtccaagaggcctccaggcaagaagtaggacagtcaggatgctttctgtgtatgtcctaggagagaagacacacattctagctgtcgatgtatcatctgtgccctgtgcagggatggtagccacacatttgtctcactgcctattgaagaacttgcaggcatcaggctgctcctcagtggcccccaaccccactggaactcagtgagatggagtacgctggttagggaactatcagaggcaaagaacatcacatggatatggctccctgccctggagatcagccttcttcctttcttccatcttccccttgcccctcccttgctgtgcccctccgtgtaatgtttttgtttgttcgtttgcttttggttttttgagatggagtcttgctstgttgcccaggctggagtgcagtggtgcaatcttggctcactgcaatctctgcctcccaggttcaagcaattctcttgtctcagcctcccgagtagctgggattacaggcatgtgccaccatgcccggctaatttttgtatttttagtagagacggggtttcaccatgttggccaggctggtcttgaactcctgacctcaggtgatccacccgccttggcctcccaaagtgctgagattacaggtgtgagccaccgtgcccacccaccaccatgtagttttgaaaggcaaggagatatccctggtggtcatggtgctgttgggaatgttggcctgtgtgtggcctactctgtcctgggggctggattctgggactacagctacagccccgctgggtttcacctgcccctccccggaacactgcccttctagctgatcaggcctaagatttgtcagacaaaaaggtgaacagcacagtcctgactctgctccctgaggtcagtgaatgcattttgtgtctgaaagggacttccacccccatcctctggacaccatctcttaggccaggcatacttttcttttctccttcctctttgtttcaggcttcgagctggtgttgtaagaaggaaatacaggtgctgggttgaaagtgcagcaggagactgcccacagataggggaccagagtttctgaattttgttctgctttcttataaactacccccctttttcctgtacagtgggaagaagatcttgaacttctttgggtcaggtgtggattttgcaatgacctggcacctggcataagcagagatttctggagggatgctttaaaacaaggctttgggctggtcccaccttgagggtgyccccagagctaggtctctgggccccacaaatacttcctctgatcatctctctagccatcgctcccatctacacagcgttatggaggccacctcaggsctacctcctccaggccagaccagggggcaagggaggtctggragttgaacctgagtggccttggggactctggaggaactaaaccatctgttttcttgtctcagccacagagcaacaacaaaaacagtctcgtaagcccagcccaagagcccgcgcccttgcagacggccatggtacctcctgactacagcttctccgcctctgaccctggctgcctcctgccccttccctcttcctcctcttgtgccccmtccctggcctcctggcctgttcctttcttggtccccatagaactgactgctttgtgtgccgccctgtatgccccttccccttcattgtcccgcctggccgcgctccatcccrcatggcagaagtgctgctcctgctcctgctcctttcgctggtggggggaagagtgatcagggctctcagctgaacctcccaggcccagcccaggacccctagtgggtctgctgtgggggctgggaaggtgagttgcttaggaaaggagagggtaggagctttcttgggacctgaacatcagttcttggaggcccccttgtaaaacctgcctcagcctctcctttgcaaagccagaaacaggaaagagggctggggtccccacctctggatggtgctgaggtctccaggctcctggagtgcctcatgctggctaagttctctctgggctcctccaggggttctgtgtgctcttggaggtccctctgctagtggtggctaactagagagtcagcaggggggtgactgggaaagagggagaggtgatgttgcctgctactcccctccttgcggaccctcataccacrtgacgtggcggcgtggggccaggaactagggaaggcagaaggcgggcgcagtgggcagctctctgggctcagcttgctgagggggcctcctgtcctggctctttctgggagacctcattcttctgcccatgttcctgcctcacacattccccgtgatgaacgctgtgggcggggcccggcctgtgccctcagtcccacagctcctctagtgtacctgccccgtgggaaccccatgtggaaagagccctcagaactgacaggaatcagggacagaggcccttgctgtcagcctcctgggcacctgcacctgccaggcctctctttcttaccagcccagtgctgctgccaaaatccagggctatcccagctgcccgggaccccagttgagccgggatattttgtcttctggagatggctggtgggcaggcctcagtggtcatcatagggtctgcgggggtcctggggtgcaggtggggctcctcagggaagagccatagtctgtccccaagtcggaagggtaatcttcatcttctctcacaggagccacaaaccactgtggtacacaacgctacagatgggatcaaggtgagtggctcctgagcctgcctcctgctttccaggtcagcaggagacaggtgggctgggtcccaggggtctacaggctgcaccctgaggccaaggtgtttgcagaggctcagctgaaggtagcctgtgcccacagttgctccatgctgaggaagggcattataccttacagagctcaggctttgcagtcagacagacctggtctgaatcctggccctgcaccttagtatcctttatctgcaaattggggatgataataatagaatcttcctccatatgtcggaagtttaaatgagagtaaacgttcactgaaaaaataggcaagagtatctccagaccctggagcgttctccatggcctgacccctttgtgcccttgatgttttcaccagcattcctgaacatctgttaagcccagataccatccatggctctggcttacagaggtgacaagacaaattatctgttcaaacggtgggtgggatgggaggcagataaaaaaccaataagcaaacagataagataagctgggcaccgtggctcacacctgtaatcctcacactttgggaggccaaggtgcgcagatcgcctgagctcaggagttagagaccaccttgggcaacatggtgaaaccctgtctctactaaaatacaaaaaagtaggcaggtgtggtggcgcgtgcctgtagtcccagctacttgggaggctgaggcacgataattgcttgagcctgggaggtggaggttgcagtgagctgagatcacgccactgcactccagcttgggctacgcagtgagacttaatctctcaaaaaaaataaataagataaaatctaatgtcaataggtaatctgaagaaaatggcagaaagtagagagagggccaggtgcggtggctcatgcctgtaatcctagcactttgggaggccaaggcgggcggatcacttgaggtcaggagttcaaaaccagcctggccaacatggcaaaaccccatctctactaaagatacagaaattacctggggatggtggcacatgcctgtaatcccagctacctgggaggctgaggcaggagaatcgcttgaacctgggaggcggaggttgcagtgagctgaaatcgtgccactgcacttcagcctgggcgacagagcaagactccatctaaaaaatgaaaaacagaaaaacctcaccaaactagacagagagaacagggccttgaattaagtagtcaggagagggcttctttcaggaggtgatatctgagctagaaactgaatggtgggtgggaaggaggcagccaggccagctctgaggctgagtgccctaagcagaaggaactgaagctcagatgtggcctttgtaatcaagcagagggaagagcaaagtgagacggggagaaccataggagagtgatgaggttggagaagcagcagggcctgctacagaggcccttgtaggagtttgcattttcttccagcagcaaggagaagctattgggagttcttagcaggagtaacagaatctagttgacactttaaaacaccactctggcctcatgatcaagaactctagggaggcccgggcgtggtggctcacgcccgtaatccctgcactttggaaggccgaggcgagtggatcagcaaaggtcaggagctcgagaccagcctggccaacatgatgaaaccccatctctaataaaaatacaaaaattagccaggcatggtggcaggcacctgtaatcccagctactcaggaggctgagacaggagaatcacttgaacccgggaggcagaggttgcagtgagccgagatcatgccattgcactccagcctgtgcaacaagagcaaaactctgtttcaaaaaagaaaaactctagggaggaggtaagtgtggaagttagggagaccatgaagctgttatcatggttcaggtgtgagatgctggtggcctggagtcaggttgtagctgtgcattggaagtgaagaggtaagacatggggtttactttggaggcagaaccagaagattttattttagattgggcgatctgaatataagggaaaaagagaaagagaaggattgaggatgactccaggttttagcctgagtaactgggtagatggtggcatttaccaactgggggaagactagggaggggatttgggaagagtcagacagccagggtggaagcagaaccttccacaattcctccttgcacctcttgtaggagcagaaactctgcttttgttctgctttgctcctctggcttccaagggatggagcatatagaaacatgttctttttggcctacagggctccacagagagctgcaacaccaccacagaagatgaggacctcaaaggtaggtgctggcccttggagggggaaggactccagcagtgacccaggtacctgggctccaatggggcacctgccttttctgtccccagaactgggaatgctggctcctatgcccctaggagagggcttggtataaaagctactttccacgagccaagatatgaggcccctgtctggtgttgctgagttgggcaagaggcttctcttctttgaccccaagtctaaaatagctaagctagagattctccaggggccagggctcagagaactgttcctgttgctgataatgatgtgccatccaagaacaggggtaccccaagtccctgccgaagtagcctgtaagtgctatgagtcataaatagagtgaccaatcactcctggttttcctcggacacagaacttttggttttaagactgtgatgggccaggagtgctggctcacacctgtaatacccagaactttgggagggccagggcagaaggattgcttgagaccaggagtttgagacaagcttgggcaacatagcaagaccttgtctctattaaaaaaaaaaaattaggaacaaataaataggccaggtgcggtgactcacacctgtaatccccacactttgggaggccgaggcaagtggatcacttgaggtcaggagttcaaaaccagcctggccaacatgatgaaaccccgtctctactaaaaatacaaaaaaaggccgggcgtagtggctcacgcctgtaatcccaacactttgggaggccaaggtgggtggatcacctgaaggtcagaagttcaagaccagcctggccaacatggtgaaactccatctctactaaaaatataaaaaattagccaggtgtggtggcaggtgcctgtaatcgtagctactcgggaggcggaggtgggagaatcgcttgaacctgggaggtggaggttgcagtgagccgagatcaccccattgcactccagcctgggcaacaagagcgaaacttcwtctcaaaaaaaaaaaaaaaaaaaaaaaaaattagccgggtgtggtggcggggtcctgtaatcccagctactcgggagrctgaggcatgaaaatggcttgaacccgggaggtggaggttgcagtgagctgagattgcaccactgcactccagcctgggtgacagagcgagactctgtctcaagaaaaaaaaaaaaaaaaaaatawawataatatatatatatatatatatataaatataaaacccagatagtcctgggaacactgggatgagttggtcactctagtcctaagattttggcctgaatgatggagttggaactaatctgacaaccgtgaggccacatttggtcatgtcctggtgggcccgtaaggaccactagcctaagcttgggcctggctagagtgccagggcrgtgggagggcatggcaggctggaccccygggaatctctgtcctgctctttgattgggcctcctggaattgctccctttgcctgaattcagtaagtgaccttgggccaggacatcagaaaagacagaggaacactctaggacagagctgggagagcatgccctgggtggcaagggggcaccaaaccttttggaaccaaaaaaaatagcagaaagctgcgaggaagtgaatcatagtagctccaggcccctgtgagtgaggtcagatcagttttgattccggcactgctggcaacataggaggcgctgtcactgctgggctctggaccctgtggcctggccccctggaacatcttccccgggatcaggggtccttggacaggctgttgtaaggctcgtctggaagccacagcccaggtctgggcacctgcctggtgccctcagctgggaggcctctctggcagaggcggcggcgtgggatgtcgtccagtgtccacagcagcctgaggcgaggcgtccccttgccccggctctrcagcgccatgggctcggggcctgtctggcttgctcgctcacctgccttgttctgtttgttttggctgctctgccttgccctgccctgccctgccctggctggctagctgccccgctccgcactgggaatggcagctcggtgcctgaaggacggagctcccgggacagaacagccccctctgcaggcatgcagccccagccttctctctgctcctcagccagtaagtgtgagggaggcacattctggcttccgtctccctggctcgtcctgaagcccctcagggacccccaccacagctgtcagtcccacccacctgcccgtggtagtaagctctgggagcatggcctctgctgggggtggggggtagactggaggtgctgttgagaccaggcaggggcccctgagtctggggcccaaagaaatatgagaagtgtgggtggaaaaacatggcctgggatgaggggagtagaaagcccccaggatgtgcagtgggccttgcctcagcgctgagccaggaagaagggcagagtcggaagtcaggtctgtgggggtgggagtgggrtgatggggaaatcgtgacagcgaggaactgtgttggggatgtagtgcttcctgagtctcagcataacagtattaagagcatggggtcagaggcaagatagatctgagtttaaatcccagctacactgccttcaagagtgtgaagtttaacctcccagagctgcaggttccttatctgtaatgtggaaataaaatggcacgcacctcagagccttgttagataaaagamaaggcagtaggaagtcttgatacggtgcctcgatgggttatcagtagctcatcctcatatttctagttacgtctgtgctggaggatgcctttgtctgctgcttttcctcccaccatctatccttgcagagtttctaagcacaaccctcttcgcccgtggggccccagtcaggtcatccagatgggtctggtggggttggagagggtgtgtgtgttgtgggtgcacacctgcctgctgcttttggaagccgatcgaactccttgcttcccttaacctgctgcttgctcacctggagctgtggcctagcggggctgacggctgtggggccccctcctggatgtgcctttggctgcgctgccctgtcccaactgtgctgcttggctgtgctggcccggctgggccgtggtggtgctgttctaacgcttgcagttgtcttgcagccttttgctcctgtgaggaaagggttgtggcctggccccgsccagggctcrggttaggatgagcccaagctcaacccaagctctcccttaccctggtggcagcccctgctggtagtggcattccctataagagaagcccatgccggcaggacatcaccagctgtcccttggctttggatgggttggggaggaggcctctggagggcaccacctctgcctgcctgtcagtctgagccctgtctggttttcctgaggaacacgtcctggcaatgagagctggtgtgaaatgtgcagctttcccaagcctcgagaggtaaatggagcagcctctctggtacaggctgtcccaagtttttacagttctgggatcatttctcccagaaaagccctgtggagttgagcagtgggaagcatccatcctagggttctgatggtcttttggcaccccagccctagctggattctgctgtcaggctacctgtcacccagggctgggtcctggccactgaatgagggctacgagtgggggtggtgattgagacctgactgagccccttcaggtgagagaagtaaattgggggtggaagcggccttattgggagatgcttgtgagagaggctgctcatacaggggaggggctcacagcattcacgatgtaccaggctcctcacctgttaaaggcaagcgtgttttctgcaacctggttgttgatggaaagggaggcaaaggccaaagaaccataactaatggctgggcttcaggagaaagtggtcattgtctctgcagactgcagagagggagacgggagggaaggtgtgttcgctcttcctgccaagggccctagagacagagaagagggatgtctttgtcataagcgatcacaggggactcctgaggactggggagggctctctgtaacttgggaggttccccagtaggtaaattgatggatttttctcccccacagtgcgaaaacaggagatcattaagattacagaacagctgattgaagccatcaacaatggggactttgaggcctacacgtaagtagagacccatttttttttgtgacctaagtcatctcccaaggccttccctgcttccagacaacaattaggaccctggggaaagggaggttggaccttgggcaaagtatctgagttaagccctctcctaaactgggagcccttccaggtagattccctgagctcacccatggtatcctggcagtgggccgaaagcacagggctgagtggctcagcaggcaggcctggaagatctttgctgtcttgtctggcatggccacaggtagcctgctgctactggatagacaccgctgataaggaaggaagacaagtcactccatagaagcctgataggctgcttttttttttctccctgtaggaagatttgtgatccaggcctcacttcctttgagcctgaggcccttggtaacctcgtggaggggatggatttccataagttttactttgagaatcgtgagtgggttcgtgctgctgatatactcctgcctgcccctttacccctttgtctctgtctcctgctcaccttctcatcccagttgcccacttttcccttatttgaccttcgtgctgcactcctactctgtatgcttgtccccttgtgccccgatggttgtagacaggcacctttgaaggccctgctcctgagctccaagtgccattcattctgcagctgctttgtggcagtgccagtcaccacaatcaagctcacttatttcttgccgggcgcggtggcttacgcctgtaatcccaacactttgggaggctgaggctggcggatcacgaggtcaggagatcgaggccatcctggctaacacggtgaaaccccatctctactaaaaatacaaaaaattagccgggcktggtggcagtgcctgtagtcccagctactcgggtggctgaggcaggagaatgatgtgaacctgggaggcagagcttgcagtgagccaagatcaggccactgcactccagcctgggcaacagagcaagactccatctcaaaaaaaaagaaaaaattatttaagcctcacctctttccaagacggattggaaggaaaccctttgagattaggttgagatgatctcagcacataagaactaagctctgtgtctgcaggtttcacaatagaggaaattaaaaccaggataagaatgtgcaaaccagggcactgttggtgatttgcgagatcggaagttgtggctagaatcttcctgactatggaggaaggcagacgtcttgtatagggggtggggtgtacattctggacagttcrtggaaaataaggggataagaagctgaatcatcaccccctcccatctttctctctgctctatgagaccctccccttccttatttttatctcttcccactttatgctgggccttccctatcctgccctgagttatagttagtcactaacttctccgctggctcccacccttatcacatctcagctacatatataaactctctgttatctaagtaattctattagccagaagcaattccagagtttatattagtactaggaaggtgtcatgtagcccctgtctaacatttgaattgaactaaaatgtgaatctcaataaaagcaacacagttttcacagcatatgctgataatggcaatccaacttcttttgccttttccccagagaatcctgggaatatcctgagcttggtgctttgatgattctatttcagctttggtgccttaaaaaaaattacaaatcaattttgaatggtttaagttcatgattttgttctgcagccctagctaggggtgagccaagccttatgaaatctaaactcagcctaacagaatagaaaatctataggctttagttaagagtcacatggtcctgagttcaggtgtgtgatttgagcaaattattccttgagcctatttcctcatcttataatgaagaaaatattatccaccaagaaatacagctcgggcatgtaaaaccccagcacaatgcctgattaaaagcgcagcaggtactgtcactgttacccatctttctgttccttttggataaaggagactaatgtaatgtggcatcctggcctctggagggcgttcaggggttcgggggtgggggggggcggtacttggagattctgggagtggttgcttgggagatggtaagacttggaagtgcaggctgggaggaaaatgcaggtgcccaggcctgatgtcctcttacctaccccaccctgccctgcagtcctgtccaagaacagcaagcctatccataccaccatcctaaacccacacgtccacgtgattggggaggacgcagcgtgcatcgcctacatccgcctcacccagtacatcgacgggcagggtcggcctcgcaccagccagtcagaagagacccgggtctggcaccgtcgggatggcaagtggctcaatgtccactatcactgctcaggggcccctgccgcaccgctgcagtgagctcagccacaggtgcacctggttgacgggggagaggggctggaagggcctgggataggtggggtcagaggaagaagagaaggctgggaggtggtcctgggagaggaggtgtgggccgtcccagaggactggcaaagcctggcagaatggttgcaataagttatgcttggaaatcagacagactasggtctggctccgtgactccaaattggatgacctcagacaggttacttcccctccctaaactgtttccttagctgtcaaagaaaggcagagagtggtgcctacctcatttaatcattgtgaggattaagtaagatactrtaagtaaagcacttagttagtgcttagcaaatgggaggcagttttgtatttaagcattagcttcacccactttccccaccttctcaggccgacttggccatgtgtttagcgtgctaaagtcgctggaactcatctgtgtgctcattgtcctctgttctgttaccacattctgtcctgtttgacaggggctttaggagattccagccggaggtccaaccttcgcagccagtggctctggagggcctgagtgacagcggcagtcctgtttgtttgaggtttaaaacaattcaattacaaaagcggcagcagccaatgcacgcccctgcatgcagccctccygccygcccttcgtgtctgtctctgctgtacygaggtgttttttacatttaagaaaaaaaaaaaagaaaaaaagattgtttaaaaaaaaaaggaatccataccatgatgcgttttaaaaccaccgacagcccttgggttggcaagaaggcaggagtatgtatgaggtccatcctggcatgagcagtggctcacccaccggccttgaagaggtgagcttggcctctctggtccccatggacttagggggaccaggcaagaactctgacagagctttgggggccgtgatgtgattgcagctcctgaggtggcctgcttaccccaggtctaggaawgaacttctttggaacttgcataggcgcctagaatggggctgatgagaacatcgtgaccatcagacctacttgggagagaacgcagagctcccagcctgctgtggaggcagctgagaagtggtggcctcaggactgagagcccggacgttgctgtactgtcttgtttagtgtagaagggaagagaattggtgctgcagaagtgtacccgccatgaagccgatgagaaacctcgtgttagtctgacatgcactcactcatccatttctataggatgcacaatgcatgtgggccctaatattgaggccttatccctgcagctaggagggggaggggttgttgctgctttgcttcgtgttttcttctaacctggcaaggagagagccaggccctggtcagggctcccgtgccgcctttggcggttctgtttctgtgctgatctggaccatctttgtcttgccttttcacggtagtggtccccatgctgaccctcatctgggcctgggccytctgccaagtgcccctgtgggatgggaggagtgaggcagtgggagaagaggtggtggtcgtttctatgcattcaggctgcctttggggctgcctcccttcttattcttccttgctgcacgtccatctcttttcctgtctttgagattgacctgactgctctggcaagaagaagaggtgtccttacagaggcctctttactgaccaactgaagtatagacttactgctggacaatctgcatgggcatcacccctccccgcatgtaacccaraagaggtgtccagagccaaggcttctaccttcattgtccctctctgtgctcaaggagttccattccaggaggaagagatctataccctaarcagatagcaargaagataatggaggagcaattggtcatggccttggtttccctcaaaacaacgctgcagatttatctgcacaaacatctccacttttgggggaaaggtgggtagattccagttccctggactaccttcaggaggcacgagagctgggagaagaggcaaagctacaggtttacttgggagccagctgagaagagagcagactcacaggtgctggtgcttggatttagccaggctcctccgagcacctcatgcatgtcccagcccctgggccctagccctttcctgccctgcagtctgcagtgccagcacgcaaatcccttcaccacagggtttcgttttgctggcttgaagacaaatggtcttagaattcattgagacccatagcttcatatggctgctccagccccacttcttagcattcttactcctcttctggggctaatgtcagcatctatagacaatagactattaaaaaatcaccttttaaacaagaaacggaaggcatttgatgcagaatttttgcatgacaacatagaaataatttaaaaatagtgtttgttctgaatgttggtagacccttcatagctttgttacaatgaaaccttgaactgaaaatatttaataaaataacctttaaacagtccattgtgttactgctgttggaggtttacggccagaggcgtagattttagcagcctgggttaccaggttggagagagtacctcctcctactccctttgggtacttttgagaataaaacttcctcatgcctgtaatcccagtactttgggaggccgacgcgggcgaatcacgaggtcaggagttcgagaccagcctggctaatatggtgaaaccccgtctctactaaaaaatacaaaaaatttagctgggcatagtggcgggcgcctgtaatcccagctgctcggaaggctgaggcaggagaatcgcttgaacctgggagggggaggttgcagtgagccgaggtcgcgccactgcactccagcccaggcgacagagtgagactccgtctcaaaaaaaaaaaaaaaaaaaaaaaaaaaaaaaaaacttctcataaacagcctccaaacagcgctcggtgctgcgcaggcgacgcggggcggggagggagggtgagtgccctgggagccggctgagggcctcgccccgcccctggtcccgcctccggttaggccgctccgcctcttaccctcccctcccccgagtgggccggcccggctccccctccgcggggctgagtggatgagcccaggcctgagcccgcccctgctccgaagtcgtggtccccgacgctcggccggcagtgccatcgcgcggagaggagggggtgcgcttccgcgggcggggcgcggagcccgccgtctcggaggccgcggctcggcccggcactgcggagggccgcttgatttcccggaacccaggtcgcgcggctgctagggccggagccggtggatccgagcgggtgccaccagcggcggcgcgccgcctcccccggtgggagcggtggttgggccaggctgcggcagagcgttcgctcggagatggcggagcagccgcgacgcggcccgtggccccgaaagcagggaagccgggcagccccgggacgcggcggagcccggggacagcggggacgccgcccagtcctccgggtgagccgcccctgaggagacccccccgcccacggtcgcgctcaggcccccccaacagactcccttggatgttgccaccatcaccacccgcagggtcgtcccgggcggcccagcgtgcgccgcgccccgggtcctttccgccggcctccctcagaaccgcctcgctcccctccggaccgggcgggctcccttcttcccgcagggctctcccagcccagaggctgtctcgatgtcaccccggagtcgccgccgcgcgcctgtggccccttcccctttggtgtcccacatccggtgcgctcttcgcatccacctgtgcccccgtctcctctcggcggggcccctccacccgccagccccgggccccctcggcgcccgcagcctccgcgccgctgctccggccgtcccggcctccccaagcccgggcccggccccggcccccgtctggcttcgccgtcctcagagatctcccgcacacacccaccccgcccagccctgctggccctcagtgttcactggcccggcctgcggcgctcccggcgccccttccctaaaccttgctgcttcttccaggtatgaagctaaaatgcagcggctaagaacgcggctctggagcttgacaggcctgacgtcgaatcccagccctcccaccaactgagctgtgtgatcctgggcaaggttctaagcttctctgagttactcatatgtgaaatggggataatggagcatgtaccttttccctacctcttagggctggtgtgaagattaaatatatgtgaagctcttagaagaatggctggcaagttgtaatttctcaaatacgggatgatacaccctgagtatcaacttcccgtcagtgacctcctcactacaatgttttctctaaagttgcatcacattcttagcattcaccccttcccgtcaccattttgatcctctcccccagctgtcttctcgtgtcgttttacctaggccaaagctgaactgttttatttttatttttatttttatttttttttgagctggagtctagctctgtcacccaggctggagtacagtggcacaatctcagctcactgcaatttccgcctcccacgttcaagtgattctcctgcctcagcctcctgagtagctgggactacaggcgcccaccaccatgcccatctaatttttgtatttttagtagagacggggcttcaccatgttggccaggctggtctcgaactcctgacctcaagtgatcacccgcttcggcctttcacagtgctggaattacaggcgtgaggcaccacgcctgtcctgaactgtttttaaatcatctctgtcaattctgaaggacctcagctctgccttatcacccctgagatgtgtgtttgggggtgggtggtagagagggattgccagccttacaaggaggctgagtggggatagtgacaataaagcttacagaagcagtcgatttaagaaaaagaacagactcaggaggctgaggccggaggattgtctgtctgaccccaggagttcaagaccagcctgggcaacgtaacaagacccccatctctaaaaaaaattaaaaattagtagggtgtggtggtgcaaagctgtagtcccagctacatgggaggctgaggtgggaggatcacttgagcccaggagtttgaagctgcagtaggctatgatcacactagcacactgtatcctgggtgacagagcaagactccatctaaaaataataaaagagatccccaaaattagacctccttaaaactgttttctgatcacactgtcctttttccttctgtcattggttggatgtgacttaagctcctgttgctctctgtcatccagtccttactcaagttgttctgtttgtgtaactggactcaatacctcatgtctctccagactagctcagggactcttctgagctgtttaggaatagggttgtagaactacttaggctaagttaggaaggagaagtagagtggactcagctgtatggcttttctcagcacccagtgtgtggcctgctcaggggttacatttttatctcctgactggcaaagttgaggtgaaggtcaggggcaggtaatgtttcacaagcaacgggtaagggagtccctaatttctgggtttggaaactggtagaatgattacctatcatgaggattgctctttccttttgaactcccccaccatagtgtccacctgactgcaagttcgttaaagctgttggctgtgatattgggtttgattgatgagaagattaacagactcatgagttccttatctgatattttgttggagcatgggacttctgaagacttccggggctttccgtcccttcctcacagaaagatcagagctgttgctggctgccagctgctcagtcatgggctaggaactcctttcagagcaggcctgtttttagccttctaggatatttagcctcttgttgatgggagatttgttcctatcatttgcatatactgctccatctctgagctttgcttagagaggagaatttggacattcatttgggtattctaagaaagggaaagggaacaagctgtgaagctaaggtataggactcagcttgtagattctcctagaggaaacttttttttttttttttttgagaacagattatccagtaagcaggaggtaagagagatgggatggggaggagaatggattaatgacaatttcagagggaggagtaacccactgatttctctgtcttacaggtagaggggaagagattgaactttgctgacctttgatgtgaggcgctcagccagggccaaggggagagcctggcaagatttgcagcctgaagccatgggccagggggccatggtgacctgagacaagtggactctgtatagttgccccctgcttccccttctacctcccctaccctatgctaaggggactcgtctccacctcgtaaaggaaactccccaagggaatccctgtcccctattttcctatccttctacccttccaagacagtcctagcctatagaactcctacctcccatcccctgaggtggtccccattcctccctcccttcctccccccgccatgctccagttgtggaaggtggtacgcccagctcggcagctggaactgcaccgcctcatactgctgctgatcgctttcagcctgggctccatgggcttcctggcttattatgtgtccaccagccctaaggccaaggaacccttgcccctgcccttgggagactgcagcagcggtggggcagctggtcctggccctgcacggcctccagttccacctcggccccccaggcctccagagacagctcgaactgaacccgtggtccttgtgtttgtggagagtgcatactcacagctggggcaggaaattgtggccatcctggagtctagtcgttttcgttatagcactgagttggcacctggccgaggggacatgcccacattgactgataatacccatggccgctatgtcttggtcatttatgagaacctgctcaagtatgtcaacctggatgcctggagtcgggaactgctagaccggtactgcgtggagtatggtgtgggcatcattggctttttccgagcccacgagcacagcctactgagcgcccagctcaagggctttcccctttttttacactcaaacttggggctccgggactaccaagtgaatccttctgccccgctactgcatctcacacgccccagccgcctagaaccagggccactgcctggtgatgactggaccatcttccaatccaatcatagtacatatgaaccagtgcttcttgccagccttcggccagctgagcccgcagtgccaggaccagttcttcgtcgggcccggcttcccactgtggtacaggacctggggcttcatgatggcatccagcgggtgctctttggacatggcctttccttctggctccacaaacttatcttcgttgatgctgttgcatacctcactggcaagcgcctctgcctggaccttgaccgctacatcttggtagacatcgatgacatctttgtgggcaaggaagggacccgcatgaaggtggctgatgttgaggtcagtcttgttacttaaatttttttcttagaagctattcacactctggcctgtcagactcccttccttgattctgagcttgtcataggtacactccctgcctttccaggcaggaagaatgctacttctcatgtatttcctgttcagtctgctctcctgatttctcttgtccctgctactcttcccaggctctgttgaccacccagaacaaactcaggaccttagttcccaacttcaccttcaacttgggcttctcgggcaagttctatcatactggtgagcttatacccctactcctttggcatatcatagtttgacctgtcccttcactgtccacctccctgggcagacaagttgaagaaaagggtcaaggtttggggtcagactgctgtgaggagctagtggtgggcatgaatttaggttcgcatgggtggctggatggcaagttggcagtggggcaaatagaaagtcttaggcaaggatcagggatggaaggtggtcagtgttgttacaaaataaaggagggaacaggggctgactggctgtggtcagtggtcagcgtgtggtcatagggacagaggaggaggatgcaggggacgacatgctgctgaagcaccgcaaagagttctggtggttcccccacatgtggagccacatgcagccacacctgttccacaatcgctccgtgctggctgaccagatgaggctcaacaaacagtttgctctggtgagacccttggatctcttccccataatttctcccagccatgcttccttttctaccttcccctaatgggctacccttttcctatcctttgcgtttttctttatttggaggcttccccaccctctttaccctctactccccaaacctcaccagg

SEQ ID NO: 97628 - DNA, 17901 bp, Homo sapiens
cttagccaggctggtctcaaactcctgacctcaggtgatccacccgcctcggcctcccaaagtgctgggatgacaggcgtgagccactgcacctggcctggtggttagtgttttcatagattcttccaggcttttcagtttaacgcatgtctgtgctttaatgaagaaatggggtcgtgctgtgtgtgcccagtgactgactgttagggaacatgtgtctgtgccttaatgaagaaatggggtcgtgctgtgtgtgcccagtgactgactgttagggaacatgtgtctgtgctttaatgaagaaatggggtcgtgctgtgtgtgcccagtgactgactgttagtcaggggtgttggccttactcatgtctggagtgcgtccctgcaggctcttggcctggtgagctctgggtacagctgtgcagtcgcctaccggcgccttctgtacctgcagtccacttagcttgcgtggctgtgtgtggtgacccacggctctccctctcctcccatcgccctcatgccccagagctgagccccacagccccttctcttgggtgcctgtgttcacatgaatgtgtaaacacgtgcgtgtctgtgtacaaagacaaggctttctttacgggttgacgaccttaatggttcctgctcttcctgttacatagaggcccttcctatccatttttttttttctcagagtgatattgcatagatttcctcacagaggcctcacctatttttgttggtattttgtataaacagaatcttaaaaacaacttttaaaatattgcacacataatgcatgtgtcttcctcgccccaggacccaggagcatccagggcaccttccatcctgcactcgctggtacctggtgtcgtggggtcatctcggggcagcatcctggtgctgggcggtctcggctctgagcagccatggtgggcgggccccgtgcggcctcctgggaagtggcctgcaagcacctgctggcctctggaggtcacagggtagctgccctggccgtccctctggtgcagatgtcctcggtggccccggtccggtcgtgtcacctggcccaggtggctggctccttggcccggttcttcccggccacctccctgaggcaccacctccttgagatcccagcacagaaataaaagccacactatttttatccctcaaaactccctgtgggccaacacacatgtgccatgtggactctgctgtggtcgccgtttctgcctgttttttcatctgtgtgcgtgttggcctcgtggcagcccaagtcccgctgagctgtgtcgggcaggctgccgtggagcccggcttggtcagggatgttggtcttgctgaacaggacctccagaccgtcctccagctcatgctggcggtgtgccggcggcacctccacggcgcaggtcagttcccaccctggccctcccctgcgtctccccacagccgccacctctgcggtgccgtccccggggcaccgtcacccccccagcccgtccaccctggccctcccctgcgtctccccactgctgccacccgtgcagtgccgtccccggggcactgtcagtcacccccccagcccatcggagagcttggaaagcaaagcttggcgtccgctgggtcccgccacccagggacgtccctgaggccagacgcctgccctccacgcgtcatgcatccccataaaaagcactgggcttgtgggctgggcttggggctgtctgtctgctccctggtgccctcccatgcgggcactgtgggacccgcacaccctggtagcagccagccccagagcccagagccgtgcctggtcggtgataggggctcgagcccattgcctgcggctgcagcctcgttcctgttttctgtcaaatggggtcagcgtgccgcctggccctgctgtgccacccccggaagcccctttgcttccagtcctggggggacattcttgacgcgtgtcctggaggtggagccgggggcaggttcctcgtaggtcctggtgtgcgcggtgcagcccctcatagggccgggtgtacacggtgccctccaggaagtttgagctaacttgtcctcccttcctgccagaggctgggatggccaggccccccaggtttagaatccggaggccggggtggccaggcccccaggtttagaatccggaggccggggtggccaggccccccacgtttagaatccggaggccggggtggccagaatccggaggccggggtggccaggccccccaggtttagaatccggaggccggggtggccaggccccccgggtttagaatccggaggccggggtggccaggccccccgggtttagaatccggaggccggggtggccaggccccccgggtttagaatccggaggccggggtggccaggccccccgggtttagaatccggaggccggggtggccaggccccccgggtttagaatccggaggccggggtggccaggccccccgggtttagaatccggaggccggggtggccaggccccccgggtttagaatccggaggccggggtggccaggccccccgggtttagaatccggaggccggggtggccaggccccccgggtttagaatccggaggccggggtggccaggccccccgggtttagaatccggaggccggggtggccaggccccccacgtttagaatccggaggccggggtggccaggcccccgggtttagaatccggaggctgggatggccaggcccccgggtttagaatccagaggctgggatggccaggccccccggtttagaatccggaggccggggtggccaggcccccgggtttagaatcctgctgaggccacggagaggctcaggccgtttttgcgtttcccatctcacctgtgctggttcccgtctccagggatggtcctgcctcctgtccttgggccctcccagctgcttcctttgctcctgcgctgaggaaggcttttgccccccagtggggcagcatgggccctccctgttgccggcatcgttattttctcccagctcctgatgggtcccttgggttgtgcttcggggcggggcaggcgggtgtgactgcactgcgcccgtccagcctcccacccgcacctcctgcccttcccgagccccctcctctgtcatttctccccctggagttcctcacgcacagggctttgtcctaagtggtcgccacacgccgttttaagagaaacctgagcgttggggtgagcgtcggacctgggggaggggggccgggcaggggccgagtccaggcacgtgggtggcgccctcacccaccctgtccccccaggaagcaggtcctggggaccaaggtggacgcggagcgtgacggcgtgaaggtgcccaccacgctggccgagtactgcgtgaagaccaaggcgccggcgcccgacgagggctcagacctcttctacgacgactactacgaggacggcgaggtggaggaggaggccgacagctgcttcggggacgatgaggatgactctggcacggaggagtcctgacaccaccagaataaacttgccgagtttacctcactagggccggacccgtggctccttagacgacagactacctcacggaggttttgtgctggtccccgtctcctctggttgtttcgttttggctttttctccctccccatgtctgttctgggttttcacgtgcttcagagaagaggggctgccccaccgccactcacgtcactcggggctcggtggacgggcccagggtgggagcggccggcccacctgtcccctcgggaggggagctgagcccgacttctaccggggtcccccagcttccggactggccgcaccccggaggagccacgggggcgctgctgggaacgtgggcggggggccgtttcctgacactaccagcctgggaggcccaggtgtagcggtccgaggggcccggtcctgcctgtcagctccaggtcctggagccacgtccagcacagagtggacggattcaccgtggccgactcttttccctgctttggtttgtttgaaatctaaataaaactactttatgagaggccagagaagctgtgcttgggagggagaggcagcctccacgtccatgagtgactgcacacggccagtcccactgggaccctggctacgccaggtgtggatctgggaggcctgtcctgggaggcacggggagcagccgggtcccgcggcctgtacgttcccatgacttgggtcagacaggcctgggcagcatcccccagcctgcgggacaggggcggccagaaagcccccagagttcctcctccctgtgaccaggtgcatctagtgggacgggagctgcctctgcaggcatccagcaaagcttcgtcgcgggtccacagccgcctgggcgttgatctcagcgtctcagggctcccaggaccacagatgcccccgatcagcactccggcggctccagctccgtccaggcacaccctcggggtggggagccgtggccctgggcacacagggcaggcacctcacgtcctggtgtcaggaagtccccagcatcgttttattacatgtcatggaggaaagctcggagctcccatgccctcccggggcaccgccttccaggaacctgcctgcgttccgcttctgggcacccggaaagtcgctcagtggctgattcagggtcgaggagctgtgaggatgaggtttcccaccaagttgggacagaaaatggggccctggggtctcagcaaaccatggccctcgggaccaaacctggcgtccgcccctattgtgagtgaagtgttactggcacagccacacccaggtctcaggatcatccatagctgcttggtttggtttggttttgtttttgagacacagtcttgtgttgcccaggctggagtgcagtggtgcgatctcgcctcctgggttcaagtgattctcctgcctcagcctcctgagtagctgggactacaggctcccaccaccatgcccagctgatttttgtatttttagtagagatggggtttcaccatgttggccaggatggtctcgaactcccaacctcaggtgatcgcccgcctcggcctcccaaagtgctgggattacaggcgtgagccgccgcgcccggcctaaatttatttatttttgagacagggtcttgctctgtcacccaggctgaagagcagtggtgcagttacggctcactgcagccccaacctgggctcaagcgatcctcctgccccagtctctcaaagtgctgggattacaggtgtgagccaccgccttcggccagtgtctttattcatgaagaccaaaaactagaacagcgcaaatatccgtccgctggtgaatgcataaacacagcgtggtccagccacacaatgggatgtgacacagccacaaaaaggagcgaggctctgacacaggccacagcctggatgcaccttgaggacgtcatgctgggagagacgccaacgcaacaggtcctgtgtgattccactcctgggaggtccctagagaccaattcagaggcaggaagtagtggccgggcgcggtggctcatgcctgtaatcccagcactgggaggccgaggtgggtggatcacctgaggtcgggagtttgagaccagcctggtcaacatggtgaaacctcgtctctactaagaatacgaaaattagccgggcgtggtggtgggcacctgtagtcccactactcgggaggctgaggccggagtatggcgtgaacccgggaggcggagcttgcagtgagccgagatcgcaccaccgcactccagcctgggcgacagagcgagactccatctctgaaaaaaaaaaaaaaaaaaaagtgttactttgtcaggtgtgatgatggtagtgtggcttcatctcgagtcctctttgagaaacactttctaaaatgctcaaggatggagggtggagggtgtgcagcggtgggcggggctgtgaccgtcacctcacctcccccacaggaagcgcgtgtggggaggctcggggcyggggccagcacccacactgggtctccacagcggcatggaggcctgcgtgtcttcactgctggtgctggccytgggggccctgtcagtaggtgagtgggagccrggatgcaggggggacactgaggcccagcgctctcggtgggtccctggatgggaggggtgggcgcgggcgccgacatcctgggtgtaagagcggagattcatccttgtttggagggggactgaggcctggggcatccsgagctcctcacgcttcaccccgagtggacatcccgggrccgtgggagagtgtggtgtccaccggctcacctcgcccatcctcccggcagcagccagaaggcaggggtcacgctcacacccgaggtgcagagtaggagactgagacttggcgaaggagatgctgacctaggactgcccagctgggagggcagagctgggactcgatccccgctggctgcctgccaccaccaagggcttggctgggactaggtgcccagcagtgagggagaagggaggtgggtggcggctcccctgcattccagctggactgagtgacaggggctcttgatgagttggggacccaagaagatggacagaggtaggaatccagccgtcagtcatcatcatccttcctcccatttttatttccttccacccatgggtccatcatccctccctccctccctccctccctccctcatctccccttccttccctctacccgtccgtccacccatcattcctccttccattcttccacccacccatccatcatccatccctctacccatgggtccatcatccatccctccctccctcctttcgttcccccttccttccctccgccagtccatccacccatcattcctccttcctcccattcttccacccacccgtccatccatcatccatccctcctttcaacctccctccttccctccacccgtcatccttccctccctccttccatgtatccacccatccatccatcatgcctctctcttcctttcccccctccttccctcctccctcccatccatccatcatccattcctccttccatccctccttcctttctcccgtgcttctgtgtatccatccgtatttgcagggctcgtgctgttctaggcctgccctcctgtctgactggaagagacaggccaggcatgagactgtgcagagcggaggaaacacggagggcaagagggcgggtggggggccgttgcaggagacgagcataaaccaagggaggaagccggtgggggaaaggtacgcaggcagctaagtgagacagacaaaggcccagggtgcaggcagcttgcaggcacagctagacttgcactcttgtcacccaggctggagtgcgatggtgccatctcggctcactgcagcctccgcctcctggtttcaagcgattctcctgcctcagcctcccgagtagctgggattacaggcgcctgccaccatgccgggctaattttgtatttttagtagagacagggtttccccgtgttggtcaggctggtctcaaactcccaacctcaggtgatccgccygcctcggcctcccaaagcgctgggattacaggcgtgagccaccgcgcccggcctattttttttttttaagatggagttctgctattcttgcccaggctggagtgcaatggcacgatctcggctcaccacaacctctgcctcccgggttcaagcgattctcctgtctcagcctcccaagtagctgagattacagatgcccgccaccacgcccggctaattttttgtatttttagtagagacggggtttcaccgtgttagccaggatggtctcgatctcctgacctcgtgatccacctgcctcggcctcccaaagtgctgggattacaggcgtgagccaccgcacccggccttaatttytgtatttttagtacagacggggtttcaccacattggccaggctgatctccaactcctgacctcaggctatctgcccaccttgacctcccaaagtgctgggattataggcgtgagccactgcacccggcccgcaagcggggacttgattttcaaagcatgatggggattcagagaagattttgagctgatttacgttacattatgaaatcgatccttttaaatttatgattgatttaaaataatttttgtacagctttattaggaaattatgcactatacaatttacttatttaaagactacatttcttgctgggcacagtggctcacgcctgtcatcccagcactttgggaggccaaggagggtggatcacctgaggttaggtgtttgaggccagcctggccaacacggcgaaaccctgtcgctactaaaaatacaaaaaaattagccggacgtggtgatgcgcttctgtaatcccagctactcgggaggctgaggcaggagaatcgcttgaacccaggaggcagaggttgcagtgagctgagatcacggcactgcattccaggctgggtaacagagtgagactccatctcaaaaaaaaaaaaaaaatggccaggtgcagtggctcatacctgtaatcccagcactttgggaggctgagatgggtggatcacaaggtcaggagttcgagaccagcctggctaacatggtgaaaccccatctgtactaaaaatacaaaaattatccaggcgtggtggcaggtgcctgtagtcccagctactcgggagactgagtcaggagaatggcatgaacccaggaggcggagcttgcagtgagccgagatcgtgccattgcactccagcctgggtgacagagcgagactctgtctcaaaaaaaaagaaaaaaaaagttttttttaagagactgggtcttgctgtgtcgcccaggctggtctcgaactcctggcctcaagtgatcctccctcctcagcctcccgaagtgctgggatcacaggggtgagccacccacatccggcctgatgtgcgttttgaaggactcctgtggctgtggggcccagtggggcctggggaggtcctggagaggggattgggaggtggcctggggggaacatgatgggggtgatgagagggggatgggagggatgaagggcagcccacacgtatcagcctaaaagtttcggggaacactggggacttcattaggatggcacatctgcttggggtcctgggcctctgagctgggcaaggacagtcgyggcaggcagcaggggcatgtagccccaacctggctctttgtcccccatcctggcaggcagctcctttgggacccagatcatcgggggccgggaggtgatcccccactcgcgcccgtacatggyctcactgcagagaaatggctcccacctgtgcgggggtgtcctggtgcacccaaagtgggtgctgacggctgcccactgcctggcccagcggtgagtaccctgccctgcccaccccaggggtccggggaatccatccracggcgcycattctctgcagggggtgggctctgggagatttaggcccattgtgggacccccgtcccctcccrgtgacracttaggcaggtttaagtgacctgcggctgtgggactcctggagaaggtttactccttgcaagaggcactggcagggccagctccttccacacygcagcctgggtcagagcctggctcctttcacggctgagccacagtcctggtgtggacagagtgcattgtgtctgtccattcacctgctgatggacccaacttaggcgggggcttctgctataaggaaggagggtcaggtgggggtgtttgccacctgtggccaggaggtcgaagccggccttcgagagtggctcgggaatcgacctggttcccsgggatcaggaagccgctaaatgacccatcatggagttgccctacctcaggactggtccgtcatacagagcccagatyaagatggtcaaagtaacaaaaagsgayctgccggcttgtgtaactgcaaagtctaggaggaggcctggcttcaggtgcggcttgatccaggtgctcacaggaggygctgtggagcccatctgtctcccagctctgctgcactaccaggaagcctgtctcacaaggtggaaagattgaccctcctcagtcccatggaaagagggcttggctctctaaagttggggcacacttaggaggattggcatgtgtcaacccctgtacaaatcactgtggttgagcctggggccccaagtgaagggaattcccagggctggttttcgtgaagctgtaggcttggggttggatttttggacacacagcccttgcctggggccagggccgggcagaagtctggggcaggggtgagagcagggagggcttcctggaggaggtgggttgcaaagacacagggaaggactggccaagccaaggcctgtgaggggcagcggctgtgagtgatggccatggacaacgggcacagtgggggcygggactgcatgtggcgggtcgtccacgccgggccaggccgcagcaccctgattccctctgtccccaggatggcccagctgaggctggtgctggggctccacaccctggacagccccggtctcaccttccacatcaaggcagccatccagcaccctcgctacaagcccgtccctgccctggagaacgacctcgcgctgcttcaggtgtgcagggacgggacagggagaactgggcaccctcctgtcccccacgggtgcccctcacccccactgcgccctccccccgctgccgaccctccccccgcactgctgcccctccccccgcactactgccccctcccccattgcccaccctccccccactgccacccctccccccgctgccgccccccgcccccgcactctcaccccctccccctgctcacctgccccttcctgtcactcgtagctggacgggaaagtgaagcccagccggaccatccggccgttggccctgcccagtaagcgccaggtggtggcagcagggactcggtgcagcatggccggctgggggctgacccaccagggcgggcgcctgtcccgggtgctgcgggagctggacctccaagtgctggacacccgcatgtgtaacaacagccgcttctggaacggcagcctctcccccagcatggtctgcctggcggccgactccaaggaccaggctccctgcaaggtgaggggcgcccgggtggggctgggggaatgaggctggcgggagggccggggccagggcagccgccgggcaggttcctggctctcccgttctctggggagtcctgtcaggggctggggggcggggaagcactggcaggggtcccgtttctcaggtgcagaaactgaggctcagacaggtttagcaacctgcgcaagaccacacagccgggaagcggcagagctgtgacttctgctccagccaagacggtccggcgggggaagaaggagcagggttcacagggccagcgggagatggggaggggacrcgcgtgggccgggagcrgcccctgtgtctccttgagcctggggataacaggcctggccctgctcccctcggcgggccctgctcccctcgtcccctcagcaggygcagaggctgagctgcggtgtgtcgtccctgcagggtgactcgggcgggcccctggtgtgtggcaaaggccgggtgttggccrgagtcctgtccttcagctccagggtctgcactgacatcttcaagcctcccgtggccaccgctgtggcgccttacgtgtcctggatcaggaaggtcaccggccgatcggcctgatgccctggggtgatggggaccccctcgctgtctccacaggacccttcccctccaggggtgcagtggggtgggtgaggacgggtgggagggacagggagggaccaataaatcataatgaagaaacgctcagagcccgcctgagtcccagcccacctctgtccatgctggctgtggggcttccgacaaacctgtttccctcagcctcccgagtaactgggtctacaggcgcccgccaccacgccaggctaacttttggtatttttagtagagaaggggtttctccatgtttgtcaggctggtctccaactcttgaccttgtgatctgcccacctcggcctcccaaagtgctgggattacaggcgtgagccaccgcgcccggcccttccctgttttaaaaagggaggttgtggatcccaaggcttctcccaggagggggcggcgttggccaggactggagcggtggccgggtctgcaggctggcaggggtgggcggccgtcctccccgcgtggctcctggggctgggccttgaacagcatcccaggatcttcttttttagtaacagcttttatcaagttacaactcacatagcagatgagtctccctgtaaactgcgattcaggggcctttggtacctgcacagagctgggcaaccaccaccgtgacatgtcaccccagcaccccgaaaacaggcccgtccccagtcaccccagcaccccgaaaacaggcccgtccccagtcaccccagcaccccgaaaacaggcccgtccccagtcaccccagcaccccgaaaacaggcccgtccccagtcaccccagcaccccgaaaacaggcccgtccccagtcaccccagcaccccgaaaacaggcccgtccccagtcaccccagcactccgaaaacaggcccgtccccagtcaccccagcaccccgaaaacaggcctgtccccactgtcaccccagcaccccgaaaacaggcctgtccccactgtcaccccagcaccccgaaaacaggcccgtccccactgtcaccccagcaccccgaaaacaggcctgtcaccccagcaccccgaaaacaggcctgtccccctgtcaccccagcaccccgaaaacaggcctgtccccactgtcaccccagcaccccgaaaacagccctgtccccactgtcaccccagcaccccgaaaacaggcccgtccccactgtcatcccagcagcccgaaaacaggcctgtccccactgtcaccccagcagcccgaaaacaggccccatctctatcaccccagcaccccaaaaggaagccccacccccattgtcattccagcaccccgaaaatagactctgtccccactgtcaccccagcaccccaaaaggaggctcgtccccatcggccgtcactccccgtccccaccccagccccggtgccctcacatcccctccctgtctctggatgggcctgtgctgacatttcatggacaggggatcacgctgcgtggccttctgtgtctggcgtctcccgctgagcgtgacgtcctcaagctgcacccgcgcgctggctgggtccgagccgtgctcctgctccggggggtcgagctccagctcgaggggggcctcgctgcgtttgtgggtgcgtccctgggtgcacatctgggcggcttcgtctgcgtccgtccgtctgaagctttgctgggagccgcctgtgtgcgttttcgtgtggacctacctgctccttcctccctccagattagacccgtgggagtggcatctcgggctgttcagtgactctgtttcagcgccgcgctgttttcctgcagaatcttttaatttcactaccaactctttctttcttttcttttctttcttccctttcttccccttcttctctttccctcccttccccttcttctctttccctcccttccccttctctcccctcccctcccctcctctctctttctttctttcctttctttcctttcttccccgtctccccttcccctcccctcccctctcctcccctcccctctcctcccctcctctctttctttctttctttctttcttttcttttctttttttcttttattttcctttcttttcttctgatggagtctcagtgcgtcacccgggctggagtgcagtggcacgatctcggctcactgcaagccatctcaggttcaagcgatgcttgtgtctcagccacctgagtagctgagggatcacagacgtgcaccaccacgcccagctaactttttttgtatttttagtagagactaatagaaacacaggtttcaccacgttgaccaggctggtcttgaactcctgacctcaggtgacccgcccacctcgccctcccaaagtgctgggattacaggcatgagccactgtgcccacgttaatggttttttattattttattttatttttagacagttcccactctgttgcccaggctggagtgcagcctcagcctcccaagtagctggaattataggggtccaccaccaagcccagctaatttttttggatttttactagagacggggtttcaccatgttggtcaggctggtctcgaactcctgacctcaaataatccacccgcctcggcttcccaaagtgctgggattacaggtatgagccactgtgcccggccgggttagtgttgtaatagacttaatttttaaaaccatttttggtctgcaggagatgtgtggcggctgtatccacagggtcccccgcgtccccgcccccaggctcctggccgctcccctctccagtccagcaggagtcacggctgacgaactcacatgaatgcgtgattaactactaaggacctacgcttggctcggatttcctcagtttcccctaatgtctcttcctgcacagggtcccacccgggaccgaacctgccgttttgccgcagcctctcctcggcacccccaggctccgaccgtttctcagaactccgtgtctggaggccggctggacgggatttatgtagattacgggtgtggaccactgcacccgccagctatctcatgtttttctctcgattggactggagtcacagtgtttttgggagaggcaagtgcatttttaatctttaacttttttaatttttttatgttatttttttagagactcctgggctccagcaatcctcccacctcagcctcctaaaggattacaggtgtgagccaccgcgcccggcctaatctttaactttttatggcatcattggcagtggaaggttctcaggtcacaagtgaagagcctcataactcacaaaccaggcacgcccctgttcccggcacctgggtccagacacaaccccctgccccgaagcccctccttagccaagtacccaagtccagtgtctttttttttttttgagattcgagtctcgctctgtcccccaggctggagtgcagtggtgcaatctcggctcactgcaagctccacctcccgggttcacgccattctcctgcctcagcctccccagtagctgggactacaggcgcccgccaccacgcctggctaattttttaaatatttttagtagagacggggtttcacggtgttagccaggatggtctcgatctcctgacctcgtgatccacccacctcggcctcccaaagtgctgggattacaggcatgagccactgcgccccgccccaagtccagtctctaaccccagagatgggccctgcctgtttgggttctttttttgttttttgtttttgtttttgttttgacacggagtctcgctctgtcgcccaggctggagtgcagtggtgcaatctcggctcactgcaacctccgcctcctgggttcaagcaatcctcctgcctcaacctcccgagtagctgggactataggcacgcgccaccacgcccggctaatttttgtatttttagtagagacggggtttcaccagattggccaggctggtcttgaactcctgacctcatgatccgccagccttggtctcccaaagtactgggatgacaggggtgaggcaccacgcccagcccctttgggtttttaaattgttcattcatggccaggcatggtggctcgcgccggtaatcccagcacatcgggaggctgaggcgggcggatcacgaggtcaggagttcaagatcggcctggccaacatggtgaaaccctgtctctacgaaaattacaaaaaaaattagctgggcatggtggtgggcacctataatcccagctacttgggaggctgaggcaggagaatcacttcaagccgggaaagggaggttgcagggagctgagatcacaccactgcactctagcctgggcgacaagagcgagactccgtctcagaaaaaaaaaaacaaaaaaaccataaataaaaaattttttaaaaaatgataaatgtttgcaactctagctatgttaatgtctgatcagcacacattgtatgtattgaaacgtcactatgtaccccatgaatatgtacaattattatgtgttctttttttttttgagacagagtattttgctcttgttgcccaggttggagtgcagtggcacgatctcggctcaccgcaacctccgcctcccagattcaagcgattcccctgcctcagcctcccgagtagctgggattacaggcacccgccaccacgcccggctactgtttgtatttttagtagagacggggtttcgccatgttggccacgctggtctcaagctcctgatgtcgtgatccgcccgcctcagcctcccaaggtgctgggattacaggcgtgagccaccgcgcccggcatgtgttcatttttttttaaaaaaaaaaaaggataaaaaggccaggcacggtggctcacgcctgtaatcccagcacttttggaggccaaggctggtagatcacttgagcccaggagttcgagaccagcctggccaacatggtgaaaccccgtctctactaaaaatacaaaaaaattaaaattaaaaataaaaacaaataaagaaaagataaaaagaaagccaggcctcttggcaatgaaagctgcccggggcagccctctccctcttcctggtgcaggtgtgttgccagcgtggatgtccttcgtggacgtgaacttattttacaaaagagcacttgtccagagctagtcctgagcctgcggtttctgggagtcaccagctcgaatgacgcaggacaagtacactttggggtggcacgtcctggtgctgttattttggggtggggtgtccttccgtggtacggctggaccacgttgcctctgtccactcactgccctcgagggatgggtgagctgtttccacctttggctgccgtgacctgggctgctgtgaacttcgcagacgtttgtgtttctttcccgcacggaaacttggacagaagctccttgtcacgtcccacagtcacacggcccctgcacgtgcttaaaagaagctgtggtgttttttttttgttttttttttttttgttgttgttgtttgcttttttttttgagacggagtctctgtttccaggctggagtgcagtggcgcaatctcggctcactgcaacctcctcctcccgggttcaagtgattctcctgcctcagcctcccgagtagctgagattacaggcacccaccaccacgcccggctaatttttgtattttcagtagagatggggtttcaccatgttggtcaggctggtctcgaactcctgacctcaggtgatccacccgcttcggcctcccaaagtgctgggatgacaggtgtaagccaccgtacccagcggaagctgcgattttccttattccttgacatcctcaagggagaccctgatgtagaggcagggaggctaggaaggaggaagcatccagcccagtggggtggacccgtcagaaatgctcagaggcggccgtgcatggtggctcacacctgtcatcccagcattttgggaggccgaggcgggcggatcacctgaggtcgggagttccagatcagcctggccaacacagagaaaccccgtctctactaaaaatacaatgttagccgggcgtggtggcgcatgcctgtaatcccagctactggggaggctgaggcaggagaatcgcttgaacccgggaggcggaggttgcagtgagccaagattgcgcc

SEQ ID NO: 97629 - DNA, 15364 bp, Homo sapiens
  misc_feature (1)...(15364): n = A,T,C or G
ggtgtggatgtgcagtgggaggtcggggaagcggtcccggagggagctgaccagcatggtgcaggccgtgggcttcagcagcccggccatgtcctgggggaagtgggagagagagagagagagatggtagagagggcaggatgtgtgcctgtgggtggcggggacatggccggggcagagagggagggacggacaagtggcccaggcaccttgatgcacaggatgtgggtgccagctcgcaccagctcttcggccaagcccatgtagtactgcagtgagtacttggtgcggctggggtcggccacgtcgcccgtgtatgagatggcagcctccaccacgcctccggcacttcctgccgcctccatgcccagcagcatgttgggcaagtagttgagggagtcaaacacacggaagacatccatgccattctctttggccacttcacagaacctgcaagggtgagagagcccagggctgagccccaccccacctccctctgaacagtcttccctggctccttcctgacccactctatggcccctggggaatgagatctgagggtctcgcctggcagggggtgtggcatccacaggcggggggtggccacacaagtgtggaccaggccctggaggatcagctaggccagtggcaggctgtggaagagggtactgagcaaggagtcttgaggcctgggttccaatcccagccctgcaccgagtgacccaggcaagtctcagaccttccactgccccaggagtgagggagtgatttagaagcctgtctggttctgcaactccaattttacacttctcgatatttccaaacagcagcccctgctgcgtgtggccacagagagacttggtgtcaggctgaccgtggagaacagaggccatcacgacatggctcggtaccctctgggccacaccaggtagcgtctgcccaccccaccccaggctcacttgaagaccacgttgtctgggtagttggtgtagcccacagcattggccccccgcagcagcatctggaaagggatgttggggatgagctcccggagctcctgcagccgccgccaggggcactcatacaggaagcgcatggcgacgtcaaacgtggctcctgcacaggaaccgagaggcccagatcagctctgcatgcctggggaactccaccaggccttggagctagctctgcagcacaagcctctggccccaataccaggtcctgctcatcttcgccatacctgtgttccctgctccaacccccacagatttttcccttgtctgatctctaagggggagaccaggctcatttgtgtcccttctatgccccctttataatcccatcttctcctctacctctctgtgctataattaacaggcaggtgtctcctcctgaccctggacctcccaggatgcacctggtctcagctctgcaacctcgtgccggcaccaggcctggccggagagggcgctgtgccttcttcggtccttcctctttggtgttcttcgtgtcagcgtctctagcttgtccccagtggcctaagcctgtgggactggccacagagcgggcgcccattcctaccaggcgctgcgcagcatgccagcctacctccccagttctccatgctgaagagcttgctgaagttgtgggcaacatagggggcgatctttttgagatcgtgggtgcgcacacgagtggccagcagtgactggtgggcgtccctgaaggtcgtgtccatcagcagcagccccgggtggttccgcacagctcgagcaaagccctcaggcccctctcgcagcaggatgtctctgaaaccagccgggggcgggcctagggtagacaggggcattggtgcccatcctgcaggtggcaacctcctgtctcccccatgagttgacagaatggatctcacctacctatgggcactgcagggacaacggggtccgtggggctggggctggccttgacgggaatcggggtggttggaccgtttaccatgacatggcctggggagaaagcgggcagtgggtcagggtgggctgggcagaggctgagtcgagggcagcagtgagagtggctgggctcagggacagggacacatccctccaggatccccgggcttccagctggcccctgtcctctccaaagccagggcctcctgggtacaggcagtggggacgtcttgaggaccacgtggatggaaaggtggggtctctcagatcagaagcaaggagagcagtgaatggcagggtgcaggacaagaggacgcagggccagaatgagggcaggggtgaggggcagggggcactaaggagttctttggtcatggggagtggcaaggaggtaggagcaagagattggagagcggaggggaggggagggcagggcagggcagtctcgggccagaccgaggtagtgcaacagcttttgggcccggttctgtgcaggccgcagctggaacagctctgggttctcgtcgatgaactgggtgtccacagtgcctgccaggaactgctggttgttgagcacattctgcaggaaggcgatgttggtctgcaggacagaggcgggtgggagggggtcaccatgcagcacagacagggaaggcagaggagaaaaggctgaaagagaaaaggctgaagatgctgccctgggccagcacagcttctgggcctccctgcagaggggcacttccccgtccctcagccctctcctcactccagcagagccccctaagctgtcacgggctgggcctgctccctccatacttgtttacaccaaagcatgtgctgaaggccacccttcctgcctccccgcagcctagaacagggctcagcctttttctccagcagcgtggcccacagcagtcacccttgcccctcgtccacgcttctcgaaagagggccttgaccgcaacagaccacactctggcactctaagtcactcctcccagctgagtccagcgggcatgctcccgccttgctgctcgttccctgggcttccaagccatcttgctctcctgtcctcttcctccccagctcctcacacaccacatgctccccaggaggccccgtcccggggctgtggcgccagtgacaggctctgcctccagggcaagacccagaggtgcaactgcctcccgggcctttccttgttcacccctcgcataagttcagcaagtccacggccagcttcctgcctatgcacccagtcctcctgtgcccagtgggtgccccactgtccccccagttaccaaaacctgcatcccatcaccctcatcacccactcctcccatgccactggtcaagccagaggattcgaccacggccattttgggaccttgtgacctcttctccatctccaggccacaccctccaccgccttcctcattgtggccacctccagccacatcaaacttgccttgcgctccacacctttgcacctgcctgggaagctctccctgaacttctcaagggccttcgccctgtcctcacaccctcggcagagctgacactcacctttccagcagtcccctgaggaacccgctgtgggcaagcacacccatcggcttcatcctctgcttgtctgcctgggaacccttgggggcagggtgctgcctgaggcatgtgtcagtgcactttgtgcacaggggccctcggttccactcattaaatgcctgggtgacaacatgaggctgggccagggtgagtatgacttaaacggggacatgcgagccagcactgtgacaggtgctccaagacctgtgaaagcatggcctgtggctgtgtagcgacagccctggcttccaccgcgaagaaaacacctccacgcgtcacttattcatgatccctgtcggcaccttcaacagggactcaaggccacccagactcctctgagctctccgtctcttaggctcctattacctggaggcctggacaggaagggtgcctcccccaccagcctgtcaggtgctcaccacagagtgggaccccgccagcagtgctgtgcctgtctgcccctgagcctcgcccctgcctctcctgaagagatgctgacatttcagctgggccaaggcatggcactggagaagggaggcagctaatgaaaccatccaaagagccccgagcgcgcagagtgagaaggacccttggaggccttcgccctgtcctcacaccctcggcagagctgatgctcacctttccagcaggccgctgaggaacctgcacgggcagggctgagcgcagacccacactgttgctgggacccttgtgttcacagacacacgctgaaggtcataaccgttctgcatcaccgagtcatgtggagggtccccactgagtctcccctttgtgactgtcgggttgcccatcctctcctccatactgtaagctctatgggggcaggaaccaggcccatctggttcctgatgaacccggctcccagcactgggtggccatggtggatgctggtaaacatctatatttagagtgaatgaaaactttttttttgagacaaagtgtgtcgcccaggctggaattcagtggcacaatctcagctcactgcaacctgtggctccctggttaatgcgattctcgtgcctcatcccaacagacatgcggtaccacgcccggctaatttttgtatttttaatagagatggggtttcgccatgtttgccaggctggtctggaactcctggcctcaagtgatccacccgcctcggcctcccaaactgctgggattacaggcatgaaccactgcacccggtggaaaacatttttgatggggagaagaggaacaaagacatagctggtgccactgcacatcagagttgacctgcaccaggactgaatccccctcattttacaaacgccacagctgaggcccagtgagtggtgacagaatggcttctggctgcctgtaagcccctcacaagctgcagctgtcctcccctctcgcccctaggaaatgcttatgtatgtaccatccaactctcctggcctacaggaggaacttgttttcagtggtcaggtaacgtgcccaggactacactgctgtgctgacaggatcagaattccaatcttgggtttccccgagtttcctgccacctggcccatggggatcagggctggagggagaacgaggatggctgaggtttaggtggcttaaggaccaggagacacggggaggtggtgacttcctgtttcccaactgggcagaccactggtggtggcgggcacagctggaaggaaaccaggctcgccgagccaccgaagccccagctttctcaaccaggaagcaaagaacctcccccacctcacgccgggagccctttctctgagaggagctggttccgagccgctcttccagggaaatggcccggcggcgacagagcgggagggaggggccgcaggcgctgcgaggacgcacagcttcccaatgcgtgcccccggcggttgggaagccgcgccgcgcagaccaatccggcccgaggcggaggccggttggctccggaacgcctggcccgcggggcgggcggggcagctggggagggaggnnnnnnnnnnnnnnnnnnnnnnnnnnnnnnnnnnnnnnnnnnnnnnnnnnnnnnnnnnnnnnnnnnnnnnnnnnnnnnnnnnnnnnnnnnnnnnnnnnnnnnnnnnnnnnnnnnnnnnnnnnnnnnnnnnnnnnnnnnnnnnnnnnnnnnnnnnnnnnnnnnnnnnnnnnnnnnnnnnnnnnnnnnnnnnnnnnnnnnnnnnnnnnnnnnnnnnnnnnnnnnnnnnnnnnnnnnnnnnnnnnnnnnnnnnnnnnnnnnnnnnnnnnnnnnnnnnnnnnnnnnnnnnnnnnnnnnnnnnnnnnnnnnnnnnnnnnnnnnnnnnnnnnnnnnnnnnnnnnnnnnnnnnnnnnnnnnnnnnnnnnnnnnnnnnnnnnnnnnnnnnnnnnnnnnnnnnnnnnnnnnnnnnnnnnnngctcgcctgtcgccgccgccaccgctaaccgcgccgggaaaaggtgccgggaaccgagcgagccggggccgcgggcgcgcgccatgggccgagggtgggcggcgggcggccggtcatccccgggcctcgtccccgcgggagcagcggccaggagtcggcggggccggccgggctcgcagggaggccggtccgcgccccctgagcgacggacaccaggtgagggggccgccgggcgcagcgcgggggccggccagggaggggccacggactccacgggaggttcggggggcgccttctctggcgggggagggtatggcggggagtggggaggcggctggcgattcctggggacgcctgggaaaggaagttccgggaccctccctgctctcggtcctcctccgcttcctgcctcatgcctcaccttgtccccagcgcctggactcccccttaactgcttgggaaatgtgacctttgctctggggggcctggccctgcaggccccaaccttccctcatctctggcggccctcttgggcctctgacccagcccctccccgggccaggctcacagaagctggcttctgggactgtcctgggcccaagtgggcacctgcgccagccccacctgtgcctgggctgtggccccttcctacagggcgctcaccatggccccgccgctcctgctgctgctgctggccagtggagcggccgcctgcccgctgccctgcgtctgccagaacctgtccgagtcgctcagcaccctctgtgcccaccgaggcctgctgtttgtgccgcccaacgtggaccggcgcacagtggagctgcggctggctgacaacttcatccaggccctggggccccctgacttccgcaacatgacgggactggtggacctgacactgtctcgcaatgccatcacccgcattggggcccgcgcctttggggacctcgagagcctgcgttccctccaccttgacggcaacaggctggtggagctgggcaccgggagcctccggggccccgtcaatctgcagcacctcatcctcagcggcaaccagctgggccgcatcgcgccgggagccttcgacgacttcctagagagcctggaggacctggacctgtcctacaacaacctccggcaggtgccctgggccggcatcggcgccatgcctgccctgcacaccctcaacctggaccataaccttattgacgcactgcccccaggcgccttcgcccagctcggtcagctctcccgcctggacctcacctccaaccgcctggccacgctggctccggacccgcttttctctcgtgggcgtgatgcagaggcctctcccgcccccctggtgctgagctttagcgggaaccccctgcactgcaactgtgagctgctgtggctgcggcggctggcgcggccggacgacctggaaacgtgcgcctccccgcccggcctggccggccgctacttctgggcagtgcccgagggcgagttctcctgtgagccgcccctcattgcccgccacacgcagcgcctctgggtgctggaaggccagcgggccacgctgcggtgccgggccctgggtgaccccgcgcctaccatgcactgggtcggtcctgacgaccggttggttggcaactcctcccgagcccgggctttccccaacgggaccttagagattggggygaccggcgctggggacgctgggggctacacctgcatcgccaccaaccctgytggtgaggccacagcccgagtagaactgcgggtgctgsccttgccccatggtgggaacagcagtsccgaggggggccgccccgggccctcggacatcgccgcctccgctcgcactgctgccgagggtgaggggacgctggagtctgagccagccgtgcaggtgacggaggtgaccgccacctcagggctggtgagctggggtcccgggcggccagccgacccagtgtggatgttccaaatccagtacaacagcagcgaagatgagaccctcatctaccggtgaggatgcgtgccccacacccggctgcactcccggcgcccttcctccgccctctgctccccacaaggctttgcttccacccctcctctctctggggctgacaccccctccccgaccatggctgctggactcttggaggagcagtggcctggcctggcctggctgcctgagggggctggagctcaaggggcggcagaaggaccccaccccgagatgtcccaggtgtcactgagctgtgcaggcctccccggcagcaggtggcggttgggtctgtctgaagcacatggcccgcgcccgcgtgttatttctgcctctgctggtgccatccccccaccccattcccctcgcttgcctgcgtcctgtgccagtgcacacacccatctcctggccacactctccagcctgttcaccttcctgagtgaacccaagagcccgagtggccccagggggaggggtgtttggagctgggagcacgggagtggggaggtgaggatggggctagaccccagccccgggctctgaccacctgcccttgcctgcaggattgtcccagcctccagccaccacttcctgctgaagcacctcgtccccggcgctgactatgacctctgcctgctggccttgtcaccggccgctgggccctctgacctcacggccaccaggctgctgggctgtgcccatttctccacgctgccggcctcgcccctgtgccacgccctgcaggcccacgtgctgggcgggaccctgaccgtggccgtggggggtgtgctggtggctgccttactggtcttcactgtggccttgctggttcggggccggggggccggaaatggccgcctccccctcaagctcagccacgtccagtcccagaccaatggaggccccagccccacacccaaggcccacccgccgcggagycccccgccccggccgcagcgcagctgctctctggacctgggagatgccgggtgctacggttatgccaggcgcctgggaggagcttgggcccgacggagccactctgtgcatggggggctgctcggggcagggtgccggggggtaggaggcagcgccgagcggctggaagagagtgtggtgtgatggacgggcagcttcctgtgtgctccaagggatgagcctcgtggggcagagggcccggggccgccgcctggcctgggagtccctccctggtttttattctcagtacctcaggctcccctgtgtacttggaggggcagggagccctttcctcggttctggcctccagaccagggtaagggcaggcccctccaacaggtgctcacagccaccgaggcaggggctgcagccacccactgggagtcttgtttttatttataataaaattgttggggacacctcagtgctagtctctggtgttgtctggctaggtcccccgagacgggaggacaggacacgggccgctggtggcacacggacaagggtggggctaccagggccggtgggggcagtcacagcagcctggggcctcctggcttcctgtccacaggggcggcccagggctgcggccaagggctgtgcctggtgtcttctgacctgcaagagcatgggcttgggcaggcggcctaccctcgcctgtaagtgcaaagaacgccccttcctgccaggtggcgacaggacgccgtatccagtgtaaagcctgggaagcacgtgtgagcgccttccccatggcacttcagggtctgcggggcggacacaggactggactaagcaacaggaggaggtgggggacggtacagccctctgggagaacggacctgggctgagcgtacagtgaaaagtcctcatggctccaggtgctgacagctgtgtctgccacctcccagggcatcttgtggactggtaaaacgccatcccaaagggactggaagggcagggaaccccactgctctgccatcagcccgtgatcctctggaaggttcctgtcagaactgtgggtccgagcaggaccgcagctgccagctcagatgtgctctgggccttcctgggaaggcggccttcgccctccctcgctgcagggaggcagccggatgggcacgagccctgctttctctgctaggacccctggccaggcccgggcagcctccgacctggcccagcccctgcagcctcctgaactatctgcttctaggcactggctggggggcatgggcagacgtggccctcagccctgcagagggtcaagctcccccaggtgctgtatgaaaactcagaaggcggccctggcaccccaggccacggcaaacacgctgcacagactccctggtgttttctgtgtgagggccaaggcgctgccaccgggcagccgaggtgaggcaggtgctctaaggcatacgtgtgttcacgtgtgcatggacctggctcacacgcgtgtgcctgccctcccagccccagaacatgcagctagaggtgggcttcgagagcctggtttagatgaatgggagcaaggtcctcgacagagaagggtgtggggagcgaacgccatggaggagtgggcgggggcgcgggacagggtgggtgggcacagacggcaaagggacaggagggccagggctgccacgctgggcgctagcatgaggctcaggaggcggctagagccagcggcctggtcttggtgcacatttggggaggacttggcacccccagacaccagagacacttatcctgctgctggccccgtggtcacggtctctagtgcccctttctccacctggggggcgggggacggtctaaagaggaagatctttccgggccctccagggtgcagaagcccacctctagctgcacccctagcaggcgcaaggttctagggcccagggaccagcttggcacgtggggagctgctgagggtgaggagggagcagaggaaccgggcacaaccccaggagccagccaggaccacagagcaacgggcaggggcaggcgagggggatggcctgggtcacccctgtgcatggccacgcatcccctcaacaccgaagcagccgcaggacatccccgccaggacaccaggagccgcagcaaggtgcagggggagcgcgtgatgtcgacagctgatgtcgcgacacacctctgcctatgtgcacgacagggacccccaacagggaggctgagaggctccccacggaagagtaacaccccctggcctctaggaagtgcgctgttccctcttaaggtgggagacaggctggccacacacacaggcataggcccagaagcctccaggggctcttgcgaccaagcagccatgtggacatgtgagaagtgattgcaggaccctgaggggacagcacggcccacatgcccccccatcccccaagcaactgcgcctcgatgacaggcagggctggaagaagctgcaaggaggacacgaggccaaggcagaggggccggtgccagtgcccagcacagcccgccctgtggggacccccaagaagaagatggggtggtaactcccacaggggctgagggccaaagcccctgtcctccggctcttcttgccattctgagggtggctcccacgggacacgtgctggcttcaaaggccgaggcggcatttcctggctgtggattcctctctagctacagacgccagtaacagagcccagcaaagggctctttagatcctaaatacccatttagagtcctcatgccaggcagggcacccaccaaggccacccaaagacaagccgagctgccagcccaccaagggcaggttgcctcccaagcctcctgctcatgtctctgctgcgcccccaccctcggctgctcctgaagcacctgacactgtgtgcaccaggccaggtgaggagagcagggggctggcgggggcctgacactgtgcaaagtgaccgcatctacatgacttgggctcttgcctggtggggggggatccacattttccagaaattaagaattatctgggaggccaggcacggtggctcacacctgtaatctcagcattttgggaggtcaaggcgggtggaacacctgaggtcaggagtttgagaccagcctggccaatgtgataaaaccccgtctactaaaaatacaaaaattagccgggcgtggtggggggcacctgtagtcccagctactcgggaggctgaggcaggagaatcgcttgaacccaggaggcagagcttgcagtgagccgagatcgcgccactgcactccagcctgggcgacagcaagattccacttcaaaaataaaaaagaattatctggagaacttgttcaaaacacaggttctggcgcctctacccaaacctgtgggatcaggatttccagaagggaagcctgatgatatttaacacacattccaggtgattctcaccccagaggggcgggacacagcgtgggtctccccggaacaagactagacaggaggcatgtgaggacgagctccggccaggccactgccagggactctggcagcgggttgcccaggcgcctgcagactctgaaaacagctggagtctggcgtgcagctgcagccaaggagagccactgacctcgacccatcagtcaggggcaaggctgaggtgaagccatgtgcaaggcccttggtggggaagtgaacggtcagggggccctccaagggccgggagcaaaggcaggcgggggctgcagcctctcaccttcacacctcggacgcggaactccgcaagggccctgctcatcttggtggcggccgtggggtggtctttgccgtgggcaatgactttgaccagcagggagtcgtagtggggcgagatgacggctccttggaaggcggaagcattatccaggcggatgcccatgccctctccgctccggaacacctgtgggaagggtgaggcgtgaggacctgcgccagaaactgcggtcaaaagtgccccacccaccccgaggctggccaggtgtgcacccagcagctgctgagagcagagcgtggggtgtctgcaggtgaatcccagctctggctggtcaggttttgctgtttctgccaccaaacccaggagtgcgtcccttctctacgtgccacgcagtcactgctactggctccctgtgaggagctgggagggggcagaggaggaagggaatgcctgccgcagagcgggagaggggcccgggcaggcaggggccagccctgcctctattcccacggacctgctgcacctgcctgagcaaccctctagcctttcagactcatccacgttcgttccacagcacggattgaggtctgctgacccggccgctaaagggcctcgccgtgggctcccagacagcgaggggacggcaggccggcgacagggcctccaaaggaccatgtgcgaggcaagaggcaaggctgaccgggggtttgtttttgtttttaacagggtggtggggaaggcctcaacatccacccatgctcccttcctttcctttcctttccttccagaagggaggatgggagggagaggaggcaacgaggaggaagtgggagaggaaatgaagggaaagtgccagaggcagggtccacacccatcagggaagcaaaccaagggcgaggagagggcagcggggcagcgggacagggccagggccagacggcaatgggaggggcagcggagaggaggagacagaggcgccgacactcacacacacaggtggctcgtgccgcctgcacctgttcgtgccgcccgagtgagccccgcagagaagggctccccggaggtgggggacccgtcaggcccaggtaaggaagaaggggagtggggggaccgcccagaggggctcgggacacccactgcccatttccgcttctcgggggcagaggcctgtgttcaataaaaaggaacttcataaaatatttaagggtgaacactcagctgagagcagaaactgtcggctaaaaatactctgtgatgaggcaggctctgaagagccagggcttggaagtggggatggagggaggcagagaagtcaggggccgccgggcagcactcagcctggggctgccgccacctacagactcttccagaaacagaaggcaggtggccagctccctgctgaagccacaggctctgctgcttccagaatccagagagctctggtccctacccccagcctccccagcctcccttgtctcagaagcccagagcctggcccaaactcatgtttgctcccctcaccgccccacacaagcccgggggcctctgccttggactctggagcaaagctggagctccatcaatgtcttgcctcctttggggctcaggcccctggatagggagcaagtccctagcacagctggcacggtgctggcagcacgtgcagggctgggaacaggcaccgagcaggccgcagggctcctgcccacagctgggaccagaggcgggggagatgggtttcggaggccaatgactgggtcccggtgctgagaggaagaaaggtacagggagccctcctggagaaggcgcgagtcttgctgtgctgaggagcctgccgtggaccgcctcagcgccccctacaccactctctcccccaccaaggctgccatctcgcggccccgaatctacctctcggtctccctcctgtgccgccatctccgactccctcccccatccttgatgggcccctgagcttggctcagactccattgggacctctgggcccagtcctttgccacccccacccccaggtcctgccatgtcagcccatccctcagatgggaggtggtgcttgggctccgtcggcagccaggcgtggggctcctgtgggagctggagggtcaggggctggctttgtgtctgggtccctgcgttttgctccaccaagccagcctgctccccgctcccaccctcacggcttcctcctgacctgggcgcccagcagtctcttcccctgggaggcgccgcccctcctctgggcactgcctgcctccgtgtactctatgtccacttcagagcccacatgcgggtcctccctaactgccgggctgtggcaacttggcactgcagccccaggcaccaggcagaacctgtgcacaggtgagctggcatctccctctgctcgagctccgcccacctcaatgcggccggtgtccggctggaagctgcgcgcggggtcctcggtggtgacccggcactggatggcacacccgttgatgcggatgttctcctgccgcaggcccaggtcgggtaggctcctgccctcagccacgtggatctgagcatggaccaggtctacgctgtagggcattggggggaggggggaaaggacgggagaaagggggaaacatgaggcgggggatagacgaggggcaccgcagccagtggggcgtccacacacagtgcgactcctgcccataggctctg

SEQ ID NO: 97630 - DNA, 47875 bp, Homo sapiens
tctactctctagactgcaattcctaaaaacctccaaagataaatatctggaaatctcgaatttgaatctcttaggatatctcatcagaagacccctaactctttcccctaggaatcctaaatctgattttttaggaagtcccctacaattctcccttctctggggacatacacaaaggctgtgctgtccaatacattagccactggcctcatgtggttattgagaacttgaaatgtggctcttctgaatggagatgtgcttataagtataaaataccagctggatctcaaaggcttcatataaataaaagaatgtaaaatatctcattaataacttttattttgattatatgttgagatgaaaatctttttatatatcgaattaaataagatctattatttcaattgatttaacctgtttctttttaattttaaatgtggctactggaaaatttaaaatgatataagtggcttgcattatatttctactgaacagtgctgcactaagatgtcttcctaccccacgcacatgtctaaggattccctgaggtattttgtggttgttgcatttcttcccccaggcgtcatggagcagtttgctatctctgaggccacactcatggcctggtcttccatggatggtgaggacatgagtgtgaactccacccaggagccattgggctgcaactacagtgacaactaccaggaactgatggacagtcagggtgagagatgttccagaatccaaactctggagcctatgaggcctccccaactatctcagctgcctccactcagctccgttcttttaagacttccttgtccatctcagctttcccattgtcctccctactcactgtgcactctgtgtcttactgccagttctctgtgctgtctcttagctgtctcttgtgctgtctgtgctgtcattcctgcccttgacattctgtggccccactgacctccatgattctttttccagatgccctggctcaagcacccatggatggatggcctcactcttacgtgtcccagggtatgtactgtctggggtcgtcagatgcctgggaagccagcgatcagtccctcattgcctctccggccacaggatcctatcttgggcctgcatttgatgactcacaacccagcttgcatgaaatgggaccttcccaaccagcttcaggatactctgctctggagcctccacctttgctggggggagacactgactgggctccgggggtaggcgcagtggacctggcaaggggccctgctgaggaggagaagaggccattggcacctgaggaggaagaggatgcgggatgccgggacctggagtcactttccccacgagaagaccctgagatgtctaccgctctcagccggaaggtgtctgacgtcacatcctcaggtgtgcagtcctttgatgaggaggaaggcgaggccaacaactagtttcctcccccaatgccctgccttccactcccacctgagggccatggctgtgacccataccctccctccccccagcagtacagctgaaactgggcagacaacattggggaacccaggagcttccagtcctctcctggaaatggaggaccaggatgggattttatccaggcttacactctagaaacccacaggcctgggaactgagacctgggcaactagatggccgtgagcttggtgtggctgtggagaaggacctgggctgtgggcttctgggtctgtgccgacaaagcctccagtgtgtgcaccctgaggacgggggcagcgcagctgtgctcaagactggatctcagttcttcacgccccgatttcgtcttccaggagccgtaactctgctgtctgaatgcctcctttctccatttcactcttgcttttcccaactctgttttctctggctgtggccccagctcatccctactgagagaacagacctcaggggctgttggacatggctggacaggcgcaggggaggctgcctgaagggcacgtccatggggagggtggagaggctgcctcagcaggtcatttggcttctgagatcaggagtcgaggaggaggtggatgtggcagctgagatctacagggggcacggatgtggttctttctatcaaggcctgcccggagacaagagagtcactgaggagactaagaacaaacacagccccttgctctgggatctttaatatcccatggctaaaaggaagatcctaaggatctgggaaaagacccagccagggctggctgctccagctcttgcttccctttcagctttcttccatccctgctccgggagcctgaggagggtgtggggacacccatcttggatacaccaacgcaggatgcaggtgtcgccaacagcagggggagcatgagggctgtctccccttattcacccctgtcctctgaagctgtttacacttttctctttgccttttctacatttttataacttcttgggcactcagggttgagtggagtggagggaggagtccggtgctgtcactccctcagccaggcagggttgcagctgagggccagggtgggcactcggcactttctgccccttcttcagctcctcccaggactcccaaacagcctcacagctgtcctccctgcctccccaggcctcctaccagaggaagagaggaaaatcagcggattcttccttccaggatggtgtatggtgaggcacaagcttgccctcccacacttggcatccatgctggtggggactgagcagcatatgcgccccagcactaccgtgagagcacaggcagaggatgggcggagcaaagcagcggtgctgtggggttggagagcacttggccctgccactgcccaggtagcccctccccagcccttggcacaggcagagttcgggtaggagagagaggcctaagaggctcactgccctatctccttctttcctcacgcccttccaaggctccggctcccaggcctgtgtcctacccacactctgtcaggagtcctaccacttgcatcctctgctggaagggagcactgttgtcctctcctggccctgggcacaaactttgccctcacccccaggccccagaacttattattttggagtgagaaggttgagagttggggtgtttctgtccatctatggtcctgtcccgccatcaagttcatactctcttactcacacttctgggatgcaagcagggcagggggttctgtgtcttccatggaagggggacaatggttatcctgaggttggtttttggaggaaacatgggcgtaggcaaggtgaaccaaggcaggtgcagtcacctaaccgaatgctgcctgtacaggggaagagtcctcttgtgcttgctaaagtgtgctgactccatgtcccaggacctcatttccaggagctctgagaggtggtctagcatgcccgccctggcagctattccccacccgtctcctgctgcaggctctggggttttgcatgttcatgtgaccttccttccatggggtccctggttcctcaccttctccaatgtgtgctattcccacatcacctcttcctgtcgtctcatcctctcagtgcccatatcatacccccagaccacggtggacagctcacctagtgagtgcgttcattcattacagttcgtttttgctcaggcccgggggagttaggaaaggtagaccacagcagctttcgttcctccttccctttcccaaggaagccaaatggtccctgacaaaagatgactaaagatctgaaggactctagcagggttcatacatgaacctgctttccccagggtgctggcatattgctgcagatggaagtcaggtgggggtctgtcttctgcaaggagctcctactcgctctgaagagggagactgaggagctggcctgggaccatcttaggactcttctggtgctgggggcagggtgcatgggggttgcttatcgtctatttcagggggtggggaggggcatgtgcaggaagaggctgtttcggggtgggaaagggttgcttttcctttggggttaaggctgtgcagcacgttttacagcagtcctggaacagggctgtttttatattcttgtgaatgaaactgctcttgctaaatgattttctttttttggagggggggtgcactttcattttcaattgactttattaaatgaaaatccaaatcttccactcctccccctccattgtcccctcccccaccacacaccttccttcttgtccttgtgttgaagagggtatcttggggaatgagtttattatcttctccacgacctcacctatacatcccacacaccatcctccaggtctgggaaatatccatttttctggccagtcttagcatgttttcttaatgtcacattcccacgccaggcccaagagagattctatgacatatattatagagagaattctatatcaatatatataaatattagagattatgtacacaagggcatgggctcaaatgcccactgccagtcccccacccaggcttcagcatctctcttggcctggggaagtgggagggatgtgatgctggagaaggctacaggctgtgttcaatgacactaaacagaatgtggtggcatcctctgactgtgagtgtcttatttgggggatggaggagactgggaacaggggaggcaaaggaggagaatgtcggagcgggggcacaatggtagaattaagaacggcatacgggatggcaggttggggagaaaaaccttgggtacggagcaagggtttggggatgctcacagcacctggcctctctttgtagagaaagcacgctaatggagtgcatagccaggcttcctgctgctgatttggggagggtgaagatgtgactctcccaagtgcggggcagcactcaagagccctgccatcttgacgctcagctcctaactctccacccctaggagaggcatctgaagaaccagtctaagagggggctggtgtctgagtgacccagtgacctagctgctctgagccctgattcttggcaggagaggccctggctagagcagctccagggtagagctgacctttggcaggacaagtcaataacaagagggaggatgtgtttcctagggagtaacctggacactggaggacaaggaagctgtgctgtggaatagaaagttttctgccagagggagtcggcggacaccatgggggcgtgattgttgagcaacagggcacttgtgtcttttgcacagagcctttggcgaccttttcttccaggccgctgcccctgacagtctttttctctgcatctcactgcttgaagcaggggacaacggagggggaatgtgggcggcctctcactgcgctagtcacggcctggcctggagacaggcagtggggtcagaggcagattgcaggagtgcacatgggccagtgcggggctccaagagaagtggctgtggctggcctcgacacaggcagtgggctcagaggcagactgcaggagcagacgtgggccagcgcagggctccaagagaagcggctgtggctggtctggaggcacattctggggtagtcagtgcccgaggccataggatggtcccatcccctcctccgacatggcacttgcagggccacagtcattctgggcctcccctcaccccacctcttgtagacactgaggcacagatagcacagtgctgggacaagagtactggggaattgttgggtggggagggggaggcagagagaggcaggggattcccttcctgcacaccaggaacactcgggaagccccacggaatatcaggggcccttcgctagggttagggccacctgcctggctgggaatggggagaacagtcaaaataattgaccaaggctcctccctgcctaaatgctgattcctcctttaagactatcacattaaaaaattcctggaagaggccacgacattggcatgacctcgccacattcaggacgcaccctgccccacacaagttcaccctcaggctgggcctctccacggtctttatgaggaggtcgtgggagggggtcaaaggatcagttcatcctcatcctcctcgtctgtggatcgcaggctggggccctgcaagatgtcggccagctcctcttccagccctggactctccaccagctccagctcctccaactcgccctctaccttgcctggggccagggagagagggggctctggggaaggagatrgcacaggggtctctggggaggcagcaatcacatcccctgttccagtggccccaggcctgtcctcaggcaggttccagttctctgcagaagatggaggtgccccggtactctttcragttgaagtcgtgttccggaagctggcaaggggagggcggagctgcaccccagacttggtgtgcccctcaatggccttctgtagctgaagagcagtgggaaaggaaaagagggtaaaaagttggaaaaagaaaaaagacgggggcagtgagagacacagaaaagaacaggtacaatgaaaggaaaaaagaacaggaaagatatagagtggcaaaacggggagaaagagaaacagaaaacaaggaacaatcagagaaagaaaacagaaaaaggacaagaaaaggggcatgacaaaagatccacctgcccagactcagacccttgggtgacctcttccttcctagtgaccacctgcagccacatccccccactgccttttttccgcagctttcctcaaagcgcatccccgagaaactgtgactcatgcctggaacccccatctcaaacccacactatctacagaagatcacgtgggccccatctggggtggagaattccattcccttcagggctgtggccataacaggcttcgtagtctcctctacctcagctggctgcttgctctaccccctccaatctctgcataagaaatacagaggggtgccaggcatggtggctcatgcctagaatcgcagcattttgggaagccgaggcgggcggatcacctgaggtcaggagtttgagactagcctgcccaacatggcaaaaccccgtctctactaaaaatacaaaaaattagcgggtgtggtagcgggcgcctgtaatcccagctacttgggaggctgaggcaggagaatcacttgaacccgggaggcggaggttgcagtgagctgagatcacgccactgcactccagcctgggcgacaagagtgaaactctgtctcaaaaaaaaaaaaaagaaagaaatagagaagggaatctgaggggacttctgagatgctaatattccttctgtccccactgcatccccttatcctatgcccagcctccctcctgctgctcaaatgggacacatcgtgattacctcctccagggccaggacgyccctgagcttccccatgctggtcacgtaagcgaggtggaggccaaggagtgaaaacagggtatgagtctgaggatgaagagcacaggtcagtgcatgttccttgccccacagctctcctgccttccccacagccctgagcagtcagcaaaagactcaccttgtgcagggttgtctgctccaccagctggaagggagactggtcaatacagcaggaatcaaaacagacaggctggctcagctgctcctrctcccaggcctcaatctgtcagccagaggaggaaagtcacgaaaatcacagagcctcctttcaccccagatacctgattttgaccccaaacggccctcctagccgctgcccagaatctgggaacatgcaagaactgatcatagatcccccagatcagaggacctcctccttcttcccaggggacagagcctctctgcccttcctcatcaggcccccaacctaccctgcaacccccaggtacccagaacacccctccctcttctaggctccaactctcctatcccctggcgtcccaaacatttgttattcccaacctatctttcccatctattttccactactactataagacgtggggctccaatcaaaccagactgctttctgctcttcaaacatgccttcccctttgtctttgctattctgaccatctggagttcctttacctgccctaccctctccctgcagtgtacgtatttcctgactctcccaatcagatgtgcttctccccttttttattcccatagtattagctggtctcaccttttcagaaatgacattggccatacttcctgctgtattggcatctgtcttacctctgcatttgtcttgagtgttatgtggtatcggctgctgtatattgtgaagaaactagcacatcacctctcatgcagggaactgtagtgggtacttgttgaaattgaagagctatactggacctcatggcacttagctgacttgagcaaagccagtttttgtttgtttgtttttgtctatgacagaagcattaaggcacaaaggccaaccatcctcttgactttagatacgcacaccaaaattcccaagagtccaaataatccattacatctctggctctcttacatttttctaaaatttctaaaatctcttttcagtcagtatcctctgaatgatctagaactctattttcctatttgtccaaatctacacctctcaaacttcagagaatatcaccaaagggcattatataggtttaggatctggtgtgtagcccgtagtgatgctcactccacctgtcctgtcctgatatttctggattacaatcatgactcctctatactctcatcttccggactaatggattacagaggttacatagcataggatggatgaccacttagcaggtgtgttgtagagaagatttaggtataggacgggggctagaccttgccaaccatggtttggtccatcccgtcctcttggtcttttctatgatcatctgtggccttatgttccgtttttgcctttccttaacaataacgcggcaacattttcagtgaatgattatcaagtacatcctctttgccaagcattattctaattgacttacccgtcttagctcatttaatcttctctaataactctatcattatcttcactttatagatgaggaaacagaggcacagcatgttgaagtcatttgcccaggattacacagtcagtaattggtggagctgggcttctaaccttgactgctgtttgtattccaggtacatctccagcttttgcgcaagggatgcaggacgttgctgttgaggctggtgtgttccactacttgaataagctcggtaccggttagaaacagagctctgtgtgtactccagagtatgcagaattaaacaaatcctagtagggacttctggcaacatataattgaatctttcaatattcccatactgcccccatactgtttttttggtcaatatcaacatcttgatattgtcaagggtatcatctggtctgaaaattgtgttcaaaacatcctgaatttcaactcctgttagatcttatccctctaaaatgtctcagtgggtcacatgggagttggtagctccttaaagtcttccctgggaaagacataagctagaaatgatagtctatcttatttttaatccctggcttcactttatttccagtggtcattcaatagccacactgatcaactagctggttttctctctttggtgcattaaattaaaaaaaagaaaaaaagcaaaacttattgttattggttttagcaacctaacaaagtactccttaaytgcaattatggcctttctgattcctgcttgtgggcagaaggaatagttcttcctttccctctgtgatcatcgatttgactttttcacaagtcatttatcagaagtgtgtgtgttttgagggggtggggaaggtttctcttctgtcttgtcactcacaacatcctcctccaatcctgtaatgcttttcattgtcagcacatatttattctggatatccaataagatgttcatttaaaaataatatctgccgtgttttttttgtcagcttcatactttacaagctttacgttttcagcgtttgcagcaaactctgcattcttttaccatatggaatagttgccaatggatttttctgttgatgttcctccacaacccctcggtatgttctgataccgcctgcttccaatcactagtccacattctgttccctcctgacaaccaagcacattcagaatgcttgatttttctctcttgaagatttgataaccacctcgtttaggaaaataggcatttgtttgtccccaggaggcaccgtggtcattattttcttcctttttcagttcttcccagtagcaatgcctagcattttccagttgttcactgtctcagggccctgatcaatccagcacagtaatctccaccaggagcagatttctccattttagtttttttttttttttttttttttgaggcaaagtctggatctgtyacccaggctggagtgcagtggtgcagtctctgctcactgcaacccccacctcccrggttcaagtgattttcgtgcctcagcctcccaaatatctgggattacaggtgcgtgccaccatgcccggcttatttttgtatttttagtagaaatggagtttcaccacgttggccaggctggtctcaaactcctgacctcaggtgatctgcctgccttggcctcccaaagtgctggaattacaggcatgagccaccatgcccggcctcccattttagttttgatgttcttcttctatgttgctgttttagtgccagyctcctggtgccattttacctccattaaagctttgcctgatccagaaagcccataatctctaaaagatctggggctcatcttagcaccatggccccatttactcatggaggctcaaagtttttctcttctgaaatgacgtgtccttctgagaacacctccatgtcccatcacacactcattactctctccataatcatccttatttccatcctctcaaaacacttcccatccagaccacattctatttcatgacaacacaataaagaaggtagaaacaaattagcaatatcttcatttgatagaacaatccaccccaggtttccatttcccttactcacctcttcaggtgacatgttatccactaaatctgtggaatcctagagaagaaagacataggtccaagttctttcccttttcttcccatggtagctatggctcccartgaaacaatagccatccctccctggccaggaccaccratgcctcctttycattcatcatcycttccatatgattaaactcctcctccttggtggggtctctgccttcctgatttaagaacygtgggtttctcactcttcaagggcaggctccctttcccctgtatccccaaacacatctcctctcacctgggttgttttcttctttgtggggcgagctctgcccagcaagcagtgaagcagggactggaagatggagggtctttgacctgagaggacaggtgagtggatggaaatggacacaaagcaacaggaaacggccaggggccccacscagtgcctaacatttgcctccaaagagctgcacttcccaggtacctcaccctctcttctaccctcctaaatcaccctctgctcccactccctgggacagtaacaaggagaattgatgaataagaaccctgtcctccctcaatcccccagcctcaccccccaccccaccccgcataggaattgcatgcaggtcaaggtcaggtcctagtgaccagagagaacccacaaggggtgagttggggtgcatgagggaagagcgtcacctgcaggctctggtgcttccggctgctgtttgtggccaggcagaggcccattgggctcttctggggacagaggggcagtagtagaggggtggagagcaagggaaggaggaagctgtaaggaagagtaagaagtctcagcctgggagcagagactgcctgggccttcactgcctttaccagttggtggatgttctgggaaagcgaactctattcttccccccagttcagaaattcctatatccctttgaattgtcgaggataccatcatctgcaaccttatcttctttagtccctggacccagaggcactggtctctatggtacctgatccagaatttctggctttctcagttaccagactctcccctccctcttcccactactttcagggaaactacgcctgtcccagcccagcccagcccagcccagacgacgcttttccctttgctcctgatctatcccactccctagcccttcccggcgcggtcacctcgctcttgccagagagrtcttcgtcctcatcctcatccacaaaggcsaaggactcgggccggcctggaggcgcgccggggagcccctccccagccagccgcgccttcccgtcgtaaggcagctccgacaacttccgcgccatctcttgggctgcgcgcagcctgcrctcaggacacaggtggcgctgcaggaggrcctrcagttccgaccgctccaccgagcccagcaggatcattgaatctgagggaaacccacgccctgcctgagcgccccctccaagccctctcgcaccaccgcgctcygcactcctgagaaggaacaggagaggcgccaccctgcccggcgtccccacatctttctcagcttcctggaaactcattttaagaatcctccaagattaacctcactcaatcccttttatttcatccatttagcaggtacggggccaattggtagagcactaattgggctaatttgtacttattttgatgaggccttatatagacttcagataggtgagctgataattaagkaggctaatcaatgctgtccaaataaaaagaaacatgagaagccattcaaataagctgagacgtgaacacgctttgaaagaagtctataagcaatacaaacattatatctctccctggaaaaagggaaacaagggaactctttcttttgtatctgacatttcatcatttaaaaaacctgggccaggcggtggctcacgcctgtaatcccactactttggaaggccgaggcaggcgggtcgcctgaggtcaggagttcgagaccagccttggccaacatggtgaaaccccgtctctaccaaaaataaaaaaattagctgggcgtggtggcaggcgcctgtaatcccagctacttgggaggctgaggcaggagaatcgcttgaacccgggaggcagaggttgcagtgagctgagatcgcaccactgcactccaacctgggcgacaagagcgagatttcattaaaaaaaaaaaaaaaaaaaccctgctaggataaatcaaaatgcctacttttcctgagaaggtcttttatatgattatagaaattttgctactatagttaacatttttattaagttttaaggccaagacattgcagcagtgctctggagatgaattttactgttaggtctcagtcattattatgaaaaccttgcccctcatttgttggctgtacccctcctctaataaagagcctctgctgtagaacgtggaatgtatatgagatttgggaaaatatttgaattaatttaatttgagaaatttggatattctgattattggaaatcagaactaacaatcttaatgactccaaatggccctacatgatttttctttattacactaattcaaacactaggaaattattcatttaatatctagtagatacctataacaaggcactctgggtatatagaattcatagcctctattctcaaggaatgcccacctagttaggaagacaagatatagatatataaaccacaataagaaatcatacaaagcaggatgaagtgtcaaatgatggtgaaggcagagaaatgtgaaattatcgtttactaacaaccattcactcctccatgtgaaacagttccagccgggcacagtggctcatgcctgtaatcccagcactttgggaggccaaggctggtggatcgcctgaggtcaggagttcgagaccagcctggccaacatggtgaaaccccgtctctactaaaaatacaaaattagctgggcatggtggtgcattcctgtaatcccagctactcaggagcctaaggcaggagaatcacttagaacccaggagacagaggttgcagtgagccaagatggcgccattgcactcctgcctgggcaacagagtgaggctctgtcgaaaagaaagaagagaaaagaaaagaaaagagagagagagaaagagagagggaaagagggagggagagagaaagagagagagagggaaagagggagggagagagagagaaagagaaagaaagaaaaagaaggaaagaaagaaagagaaagaaaggaaggaagaaagaaaacagttccaactcttccataagttgggcattaaagaacaagcatgacttatgtaagcatcaaaatggaacaacgtaagaagctatgggatttacattaattgtcattattcatggattccctatttgtgaattcagctagtcactaaaatatatttgtaacacaaaaccaatactagaggtgctttcactgtaattcacaaacatgcawagagcaacaaagatttttagttgtcccatgtccctgttcccagctgaagttgaacaaagcagtgctgtaccttcttgtttcagctttcacattgtaaacaggtgttcattttgtagtctatttagtgccatcctttttgcatttttgtgctttgtgttggtgattttgctgctaaaaatgaccaccaaatataatgtcaaagtgctgtttactkttcctagtgcaagmaggctgtgatgagccttattgagaaaatatgtgtgttaagtaagcttaattcaggcaagggttatagtgctgttggcacaagttcaatattaattaatccacaatatctgtgaaataagrtgtctttaccagaaacacacatacaacaaggtcatatattgattggttgatggaaatgtgaccagagactcacaggaacacagccctgtatttttcctaggagcaattrttcagtatagtatttgaacttcatacttaattgaacataactaccatgaattatgagaattgactgtatttagtgggaaatttttttttttttaacagagtttcattcttgttgcccaggctgcagtgcaatgacacgttctcggctcatcgcaacctccgtctcccgggttctaattacaggcatgcaccaccacacctagctaattttgtatttttagtagagacagggtttctccatgttggtcaggctggtctcgaactcctgacctcaggtgatctgcccacctcggcctcccaaagtgctgggattacaggcatgagccaccatgccaggaccttttaattgcatttttaactgtctttgtgtgcttgtgttatggcttaatttttccttccttgtacatagcacattggatggcccctaaagacaaagcccccaccatggggcctcctctacctctatgtgacccttattcaggtcactagctctggagtcgacttcttcctccccactgaccttttgagtcaaccagtggtaaagtcttgactgtggtggtctggagcagggttcgcaactccccatatgtgtaagaagctgaaacaaacttcacatcacgtaccatgatgtcctcaacaaagatggtatatttgctatggagggagaaagcatggtgggttagccccaccgtatacctatcccttccattcctcccataagatttgccatactttcagtcactcacaatatctactaggtgcatgagaatataataataatttaaaacagtgtttccaaactttaacyctaagctcagtctcagcctcagaacctcccactctccccatcagatctgaactaattccgtctagtgcccctgacctgagctggttccagccaaggtcaggcaagtagggtagcttcttgacctggatgatgctgtcatagagagagggctgcaggctctgggccaccatgttggccaagataayagccaccatcatgggcaggwtgtgagcaatcygacccrttaattcgaagcaaatcacagctgtggagactgtgtgggaaacggcaccagtcagcrctgctgctcctagaatgacacaggaatacgcctgtaggttagggctaccgttcttagcatgaaggacatatggggatgggatgggaataacacggaatgagagacatgaccctggtcagtgccaayactcataatgacttgtcaagagtagggaatagaatactgaactcttmgaaaaatcatcattttgatctcattctataaacttcaccaagttacaaaatctttgtgtgtgccaaaattttcatttataatatgaagatagtgatgtcctatccattccttgcttttaaaagtttggatgattattcactgagcattttattttattattttttwaaawtattattattattattattaattattattatttgaggcagagtctcactctgtcacctaggctggagtgcagtggtacaatctcggttcatgggaacctccacctcccaggttcaagtgattctcctgcctcagtcttccgagtagccaggactacaggcatgcaccaacacacatgtctaatttttgtatttttagtagaaacagggttttgtcatgttggccaggctggtctcgaattcctggcctcaagtgatctgcctgcctcggcctcccaaagtgctgagatcacaggcatgagccactgtatcaggcctcttcactgagcattttacaactcagttataacattttttttttttaccttgggctttaggtattaatgccaacaattagtgagtaaatagaatgaaaacccgagaatcatactgtggacatgcagcaatgagacctgtgtcagatcctgctcttactatttctcaatggaatgagtagagcttaattcctctggaatcccatgctctcaattataaagcgaaaggggtcatttagatgatttctaaggcscttgtagatctgaaactttataattctataagctccctgaagatagaatctatcttgttaatttttggttgtttctccactaaccaaaatagtcctttgtgctttaattatatttcttatttaaatatggaagaggtatcctatggggaaaatgtagaggaaggcacatatgaaaatgtaacaagaaaaagtcagccgggcatggtggcttatgcctgtaatcctagcactctgggaggccgagacaggtggatgacttgaggccaggagtttgagaccagcctggccaatatggtgaaaccccatctctactaaaattacaaaaattagccagacatgatggcatgtgcctgtaatcccagctacttgggaggctgaggcaggagaatcacttgagcccaggaggcagaggttgcagtgaacccagattgcgccactgcactcctgggcaacagagcaagactctggaaataaaagaagagaagagaaggagaaggagaagagagaaaagaaggaaggaagggagaaagaaagggagagagcaaccaagaaagcatcacagaagggaaatatagggaggaatgacactattggatattgcatataacatacttcagaacataaacaatcacaggacgtgcatacaaggaaatgttcacaagggaggcatgtgtaccagggagtcatgaagatggagaacaagagtctatgaccctcattgatgaaagaggcttttagaaagaaactatgtcaggggagcagcgtaccaagtgagctagaaagctggtcagcacttctctatgtagggaaggcatggccttagatgctatgggattttgctgaggaagggaggaagcataataatcccaggattctattggtgttaggcatagctctatctcagaagtcattttagaataaagaaactagggctcagaagcagctatcttgcttcatggtgactggtaacaagtggcaggagaagtctagagccatgtttcttagctcttagtcctgtgctcttaactacccatcaatatcaacacgtctcaggttgagtcaatcacctgcaacctgagccaatcacctgcattgttggttccatgattcttgggaaggaaagacagaacccttatcaaacatccagacacaatcctagaatcttatgatctcatttgatccctatgatccttttctacatgaggaaactaaggctcacggaagttcagtaagaaataatgagagtcagagccatgggtatgttatctgagtaaaagttgagttaagtagcactaaattaaaaccgtattgtgtagcctagaatgaagatccaatgggrgagtttaagtgtggggatctgaagtactcaatgtttgattacagggaagtgggaatgtttctcaccaattactgcatagcccccaggtaggatcttgtagatgatgtcatcaaacaaaataccatcaggaaagagcatggccatgatttctcctaccagmcttccaaatgcagctcctagagggaagataaaaggaaggaaggtgttacgagatccaagttccttgctctcwgttttcagarccaatctctccttgggcattaagaacaaatataaactcccagcatcccgggcctttccttatgtttcctgtatcctagattgcaactctcagtcagaccccaggcttcccatcagaacttacctagcacaaacacaggcaygaagcctccgcagggtatgggcatagtggtggccacgatggacatccagaactggagtaraaagaagcgttggaatacyctttcaactctgcccaatagacatgcacacacaattcccttcccactatcctcctttctgcagaaatcctgggatagctgatccttctgaaagtcactttgtctgtcacccttcttccagaaacaaaagccatagagctctcaggctaagagatcaccaaagacaatactatcagaaggttcctctagatggctagaccaaatcccttctactttgagtgcctgtatttgcctttcagcaatctagaacaaggaatggagccccggagtacttatctttctctgccccaaaagagccccagcccattgtacccatttagtccagaaagtttgcctcagcaaagtagcctgaaactcttgaagacttttcctactcaggttatatttctgaaaaggcgctccggttttttttttttctttttttttttttttgagacagggtctctctctgccacccagcacccaagctggagtgcagtaccatgatcttggctcactgcaacctccgcctctgaagtccaagctattttcctgtctcagcctcctgagtagctgggactataggcgcacgccaccatgcccagctaattttttgtatttttagtagagacggggttttgccatgttgccccggctggtcttgaactcctgacctcaggcaatctgcctgcctctacctcccaaagtgccgggattacaggtgtgagccgatgcgcccggccaaggagctccagttctaagtgtcagacatttaaagtctgagtgacttattgtgtgattaattgagcttcaatggggtcatagaaccatctatatggtgaaactcacagtagaacctggagagaagacttacctgcctgagccacttgctttaatgatcagatcaccttaaacaaggatcaaaatttagatctgtcctggctagctactggaagggtaaattgagaaagcctgataagtcagccaatgtgatagaaaaaaaatctctaaggccaattttgtaagctagaactccaatagaaattgagaccattttacaaaaagcaatatgtgcattttgaggcaaagagtacaaaagaattgtccgggtgcagaggctcacgcctgtaatcccagcactttggaaggcagaggtgggcagatcacgaggtcaggagatcaagaccattctggctaacatggtgaaaccctgtctccactaaaaaataaaaaaataaaaaataaaaaawaaattagccaggcatggtggtgggcacctgtagtcccagctacttgggaggctgaggcaggagaatggcgtgaacccgggagttggagcttgcagtgagctgagatcatgccactgccctccagcctgggcgacagagcgagactctgtcgcaaaaaaaaaaaaaaaaaaaaaaaaaaaaaaagaattgagaaatagaatggaaaaaaggctagttgtggaactttttaaatatctgtaaaagaaatagaagtatgagatgtcatatgtaagcaaagcaacaggtttatatatcccttccaaaataagtaaaccaatttcagaaatggatctcaaacttattaggtgtaagaaggtagcagctaaagctcaggacaaactgccaagatgaaagtattcacaattttagagctgtgcgcaattgcactgtaagctaacgagaaatatatttcttaattttcagaaccgtagaaagaaagaactcccctcatccagggctgacctcaggagacagtgacaaagactctaagaaagtctcatcccagaagatctgagatgaggcaaaacacacactccttcatgtcagaatatgactattcaaaaacagttgagaactataaaaatgaatgggcaaaatgaagagaatagagactgagaatcccctgaggacagagagtgcatcttgtcctttctgccttctctctgcactggcacagtgctcagtaaatgtaggaagggtgtagctaggtgagtaggtagaaaggaaggaaggaaagaacgaagatgggctgaacaaatagtattcatgcaaaggaggaaaagcttctcagagctaatatttgctaaaacactaaagagtaatgctcatccaggggaacttgctttaaaatgcagatgaccagaccccactggaagctaccacatcagattgtctgcagatagggctataggcacttgtaatttaagcttcttaagtgattctgacatttaacagttggactgaactatcctgtaccatctctttgaaataagtacataaaagccataagagattttgtaggctcaggttaatctgaaagctctagcaattcatataacaggtaaccaataggtctgatttcagaagatgtattttagattatcctccaagatatgtgtaagaacagtattacaatcagaagacattgaagttatcaactcctatagcacaaaggttgacacatgagattaacaaacttttttagctattggcacgtgaaagaaaagatccagaagtaatgtgaaacacaaataactcccaagactttcttctttctttttctttctttctttctttcccttccttccttcctttttttttcttcttcttcyttttttttttttttttttttgacagagtcttgttctgtcacccaggctggagtgcaatggtgtgtcagctcactgccacctctggctcccgcgttcaagcaattctcctgcctcagcctcccgaggagctgggattacaggcgcctgccaccacgcccaggtaatttttgtatttttagttgagacagggttttgccatgttggccaggctggtctcaaactcttgacctcaggtgatccgcctgctttggcctcccaaagtgctgggattacacccagcttttttttttttttcttcagatctagacctacagaactaccacgattttaaacactcaatttcagggaactggaaaactggaaacccattatgggtttccaccatatttagacccttcattagaaggagtaaaatgaagaattcacttcgggagaatgaagtgaaaggagtgaaaaaaaattcaacagagcctcaggctgtgcagagaacttagtgatactaggtaacaatgttagacttattaaaagcaaactgagaatttggaatggtattcatactcattgtaaaagctcttctcttgatgtataatgtaatgacactttccacgtcatgagattaaggaagatggaagttctcttcattaatattataaaacagctgaattggccaggtgcggtggctcacgcctgtaatcccagcactttgggaggctgaggcgggcagatcatgaggcaaggagatcgagaccatcctggctaacaaggtgaaacaccgtctctactaaaaatacaaaaaaattagctgggcgtggtggcgggcacctgtagtcccagctacaggtaaggctgaggcaggagaatggcgtgaacctgggagccggagcttgcagtgagccgagattgtgccactgcactccagcctgggctacagagtgagattccgaatmaaaaaaaaaaaaaaaaacaaaacagctgaattgagaatcttacctgcctgtacagatgctgctagaagaccacatagactacatttcaaattaggcactggaaaaattgtttcagtcatgtttatattttartttagctatgtatcctacctagctaaaaaataagagtatggttattgtgtccaatgattagacagtgaaaatgctgggaagtggtgataaccagggaatatcatagatttgtagcagtgaatggttttatgttcgtaaatattataggatattataggcctgctgcaaactgttaggcttgaaatatagcccaggaagtatatgtttcttttcctgatacagtatgatgtaacattatcaaggatataatctagtgagaaattaataattgtggcatacaggtgagtcctstataycatctaagtaggtttctcaaaataagcttgaatttgcgaagtggaatccagacatatacttgggaatctggagagctgggatgaggtttggcagaaatgttgaaaaatatacagtatttygtttctacaggacttttcaaaatcttgatattttaaaggtacataygatgccaatgttgccgtatagctcagtctagaggaatctcagaaaaatacagttatcatcattggactaccgtccaattctgagatccaccaaaatttgtacttggttactgtagatgggtttgtgtactcaacaactaattataggaggttgggatttataaattagagaagatgaactctataatgaaagtctaaaaatcaaatccctaacaagacactgaaaacttctttcatgataaaaatgtaaaatcttttgaagaaagacattttaaagggattaaattaataaagtgaatgtgcaaaatatgaatgctgtagattcaactaaaccacctaaagtggaatggggaagatcatttgcaaatacagtttctagacaccctgggaatatgttacagagttgaaatctggtgtttcacgtatctgctgtctctagtcttaacatcactaaaaaattaaattaaataaacagcaaaaaatagaacgttttaaaatatttaaaaattttttttctgttgcaagcataagatatagctaaaggttaatgatgaaatattatgtacttggcacatagtaaatgcttaataacatttattgaacaaatgaactcatgaacccactgtagctattgcaatataaatataacttagtgactcatatcctgggaaaacatagatttataaaaggtatcataaataagttaatagcaaggtattcaaaagcttgaaagttcagtatggacagacttataaatgagaactctaatatacagaggaaagtgttgtgttatttaggcaagacatactattagtaaaaaagataatcatcacaaaagaaaaaaaagggcaatcaataatttttttttttttcttgaggagtgttgcccttgtcgcccaggctggagtgcaatggcacaatcttggctcactgcaacctccgcctcctaggttcaagcaattctcctgcctcagcctcccaagtaactgggattacaggcatgtgccaccacacctggttaattttgtgtttttagtagagacagggtttcaccatgttggtcaggctagtctccaactcctgacctcagatgacccacctctctcggcttcccaaagtgctgggaatataggcatcagccactgcacctggccagcaatcagcaattgtaatagatgtcacaaccaggggtagaaataaaaatatcttattacaaggcagtaattgagaagtctataaatacataatccttgatgggcagatatgaaaaagaagtgatgtraaagagatcatcttttattgcctagttgaagctagaagaatatggtttgggaatggcaaaatcctcacagcttcatcacctaaatagagaataataacatgtataaaaattatgtgtagtcactaatacaattaatttaaatattttatcccttttgaagatctaaaaaagagattatctacaaaaccgggggaaaaaagatgctcaaatcacctaaaaaatggatcatcagatacatggagaatgaaatacttaattatctactaagtgggggaatttggttaattaatccaaggcttttacagttatttataatgcttaactctatcttgtacttttttacttggctactgtgacagcttagtaatttaacaagaagaacaattagaagggttagataactatgccagacaacactaagttgacgtgaatacagcaattaactcagatactagtttacttctatagcaacttacaactctataattttttttttttttttgagacagaatcacactctgtcacccaggctggagtgcaatggcacgatcttggctcactacaacctccacttcccaggttcaagtgattctcctgcgtcagcctccccagtagctgggattacaggcatgcgccaccatgcctggctaagttttttgaatttttggtagagatggggtttcgctatgttggctatgttggtctccaactcctggcatcaagtgatccacctgcctcagcctgccaaaktggtgggattacaggtgtgagccaccatgcctggccaactctatggttttcaaatgacttatttttaggttggatgaagaccaaatgaagttctaccccttcctaccctatgcaaaccctgggttcatagattgaaaacagatggaggtttagggtgttgctrgtgtcaggagcagtaccttcatgacgaagaagagaaagatgatgatgacaacgttgacccgggggtgaatccacacagctgactrgcccaggctctcaggatcacccgcgtgtttcacccatgtattgttgtcaaacaaagtactsatggcttcgcggggcatcaactgggagaggaagaagcagaaagggtgggttctccagggaactcctgtgcttccttttttagagaacttattccccagcctcattattcaagggtctcttttgcccttttctcagggagaatctagaaagtctatccttggacaaaactacttatgctctgaagcctgaggtatatctgtgctgtttcctctttaccatgtggccccaccaacagctgacctctccarccatgmattgacccattcctggtgggaaggtgaatgaggcaatgacaaaggtaacaattccaggatacagcaggcggctgaaaaagaaacagagttaaccgccacaattcagccaactcacagtaaataccatactgaacgatggcaagctgaagtttcctttagtccaccgtagtctcatttctttaaatgaaaaagattctcttcacacaaaaaamcaatatttgaggccgagtgcggtggctcatgcctctaatcccatggggcactttgggaggccaaggtgggcagatcaccttaggtcacaagttcaagaccagcctggccaacatggtgaaaccccatctctactaaaaatacaaaaattagccaggcacggtggtgcatgcctgtaatcccagcactttgggaggccaaggagggtagatcccctgaggtcacaagttcgagaccagcctgggcaacatggtgaaactccatctctactaaaaatacaaaaattagctggtcgtgttggtgcatgtctgtaatcccaactactcaggaggctgaggcatgagaatcgcttgaacccaggaggcagaggttacagtgagctgagatcgcaccactgcactccagcctgggtgatggagtgagactctgtctcaaaaaacaaaaacaaaaataatctttaaatgggagaccacacaattcaccccctaaccacaatatcagagcttccttatattttaatgcaagccacccagaggcatttaatgccttccccaaagacaaaaagggaggaactcttggagaaaccagaaagtaaatgggtagggcaaaagaagggcagtgactcactgcttagcaagaaactggctgagggccttgtgctttcggacaccgagcatgacttggcgatgcagatacacaaatacagctcccaggagcccacagcaaatcctgagggtgtaatttatagagttggaatcttacagacatgaaatcctcatctcttggacataactactgcagggaaacaaataccaggcttctgcctttcctatctgyccacatccccccagcaatgtactctatctgtgccaaccgcaccttctttctagcttgggtcccttccaatctacagcctcactccacaccctgctcaccacacacagagcaggtaaccccactgaccsgatggcagcaaaagctggtagttccttcaggtcaaaggggaaatccattcggaaattggttctgaacagagyagtgrtggtgactgtaggatggaaaggccagtattacgatgggagcttcgtagaaacccaacagggaaacagaggtgggcagttttcaggattaattccttccttcctccaatcccagtttctcctcttgaatgtattttccttttttctacgcacactcctccatggatatactctcccactccatgacctatatctttgtcatacacccttgggccttggtcccaccccacaaatgatgccgcccattattccttttctgaactgccccacagagttttcctctgcaccccattcccagcttttctatttcacatggcctccacccaaggcctccttggttaccagcatccttgttccacactgccagcactcgaaacacaaaggygctgaacgtggctgcaragaatcctctccagtagttcygaacagcaaagtaggtggaggtgacctcgatgctaaatagcactcctgcaggggcacagaagtgtggttgggggcagccagcagtgaaagtgctcccccacactccccactgcttggacctaaggagcttttgctgaaacatgaatctgggtggaagcagtagtggaaagtaatgatctcttggattcccatgctcaaaaccacacaactgctcaggctaggagttttttatttttatttcagacaagggatgggtccaacacagagaagattgaaaacgaatgggccttcaacctccaaaacatgaggaccaagtgtccgtgccctctgcatcccttagaatgtagggttgaatggggttcacaactgtcagatacccacagggactaaaaggtagttgaaaaaaatctgcagagaagttaagagagagaaagttccagagcagttcctcagtagagttgccaagcagagctcaggatttacagggactctccttaacaccctcctctggactttcctaccgttctacatataccatgtaccctggggcaaccttataaggaagacagaacaaaaataggagggggctttgcaggagctgaccatcctcgatagttcaagaaaagaaggtagaggagtcatacaaataataataataataaactaatactaaaaacccgacttaaaaggaccaacgcaaggggaaaaaccaagaggctagaagaagagaaaaacaatcatgcttaagaaaggtgggtgaggcaaaaggaaagctaagtagtagttctaagtagtactgtttctgagcgtaggtgctggagcagaaattgagggggtagatctacagaaaaagarcaagggttggtagggacaaagtaaggaatgcgagtgagggcgtaaaaagcaacactcaagagaggcaaagaaaaaaatatttcaacatattaagaataagggggggtggactttaatctgatgcaaagtaaaaattgatgacaaaattacctaaaacctggctaagcctcatctttatcaaaaacgaggaaaaggaaccagggaaatgcaaccacgcacataattggatgaatggagatgaggcctggcctcaggaaaccttgaactaggcaggtttgtcccctttctctccatgtgaacagggtgaacgccctcttcaggcagcacctcgcatcctagtaattttcttctccctgtgctatattcaaaggccacatctcttgaatcccccaggaccaccaccttctcttctacaggtgacagtcgactagttacatcaggtcatttgcaccagggggagggtggcctaatggttactcccaaatgcagcagctgctacagtttggcagaggatttccagtggtcagtcccaagtccccttccctgggaagccatccccaatcctcctcttcaggtcgaaaccatccgtccttcagcctgcgctctcagaattttgggttattatagcactaccactttcagatccagatatttctttacatttcagagatcccctaggattgaaaattcctgggaggccaggcgtggtggctcacgcttgtaatcccagcactttgggaggccgaggcagggggatcatgaagtcaggagttcgaggccagcctggccaacatggtgaaaccctaactctactaaaaatacaaaaattagtcaggcgctgtggcaggcgcctgtaatcccagctacttgggaggctaaggcaggagaattgcttgaacccgggagacgcaggttgcagtgagccgagatcgcacctctatactccagcctgggtgacagagcaagactctgtcttgaaaaaaaaaaaaaaaaagaaagaaaattccttgaaaaccagcacctagtacagtgcctggtgaataatcagggctgaatgtctattctctgratgagcaggggaggagaggaaaggacaggatgaggaaagaagagaacagaagagaacagaatttcaggaaacagagaaaggcaatgggcaatgtggggcagacagagcttgcttggccaatcaccccttctgccctgctcttcacatcacatcaggtaagcagctgcctctggggcctaaaaggaggatttgacacagcaggaaccaggtagagtgagtctctctccttttctataccagtaacaaaagcagtcagctttgatttgcctgggtgtaaactatccaactgatgaatattttacaacaattttttgaaatcctgggctaggttttctttcctacgacgtggttctgggacactttccctagcagtctgtcactgtatgctccggaatgagagctaattttaatattagcctgagccagacataaaatgtgcagctaaraggaaacaaagcattaaaaacaaaaacagctttcggaagctctctgctcaggttctggaacattgctctcttctcccaccctggattccctctctaccttctctgctgctcctgtccctctgcccaaccccagcctttgtccttggtctcctgctcctcctactcatrgacacactttctctctcaatttcatgtatgctcatgccatcaactacacctatatgctgctgattagcaaagccatgttcctgagcttcagactcgtcaaccccgctgcaaaaatggtctcacctagatatgtcacaggaacatcaaattcaatacactcaaagtgaaatgtatcagctagctccccccaccagatctgtttcacttcccatatacccaatcttggttactaacaccactatcgacccaattgcccttgtaggaaatctgggtgttagcctagatccctcctctcttttaccccacacaaaattaatcaccgggatgctaggcaggtggcccatgcctgtaaccccagcactttgggaggccgaggtgggtagatcacttgaggcygggagtttgagaccagcctggccracawggaaaaacctcacttctactaaaaaatacaaaaattagccaggcatagtggcgtgcgcatgtagtcccagctgctgggaggctgaggtgggagaattgcttgaacccaggagacagaggttgcagtgagccaarattgcgccactgcactccagcctgggccacagagcaaggccctctctcaaaaagaaaaaaataaaattaatcaccaggttrtatcaattttactttctaccattcttctctttctcttctgcctctgtccagtgcagtctcttactacctagcatcaggactatgacaatcgtcttcttgttaatcttggattaatcctgttaatccccagaccaattttgtcctgcacacatctgacaaagggattgggtggacactcaaagctggccatatcacttccttgtgcacaagtatttcatgactttaattcaccccgacagtatttcccraagtcaggtctgtgagatactacaaatcccatgcccacgagacagggttctgtgggaaatgctgcattagagacacattttggatattcccaatgtgtgtcagcatatcaaatgttctggtaacttttctttttttttttttttaagatggagtctcactctgttgcccggactggagtgcagtgacgcgcgatctcagcttgctacaacctccacctcccaggttcaagtgattcttccaccttagcctcccaagtagctgggactacaagtgcctgccaccacacccagctaatttttgtattcttaatagagatggggtttcaccatattggccaggctgttcttgaactcctgacctcatgatccgcctgccttggcctcccaaagtgctgggattatgggcatgagccactgtgcctggccactgataacttttttagtttaaaaaaaactctctttaaccaagcattttccaactggtttatagmaccatttttacacattagatctagtaaaccatgaaacacattcgtgcaaatcctagtctagagaataaattccatattcttatacatagccatgagagtcttcataattcagcccccctttacttgtccagcctcatttgctattattccttcctctgtatcccctggtaatactcagctactgcccccatcttgactttgcaatgctgtttcctctgtccagaataccttgcccaccatcctccttgccagtcctacttattattcaagcctcatgtcaaacaccacctcttttgtgaagcttcatgggctcttgtaggcaggttagcataaggtccccactgcactttaccccagctgccattgggccactttttcgagtgagctatgacaataggtttgcctgcctgtccagcctctcaactaggagcaccytgagtgtgcaagatccaacacagggcctggtacagaatgggagcaagatgcttgtcatttcagtagaatgctgaattccatttatttcattagtgtaagaaattaagagctgactccataatgaatacctcattttgatactaattttcctttcagaattattcggtattcttttttaaaaatcaagtaataggccaaggtgggcggatcacttgaggtcaggaggttgagagcagcctggccaacatggttaaaccctgtctctactaaaaatacaaaaaattagccaggcgtgatggcgcaggcctgtaatcccagctacttgggagactgaggcatgagaattgcttgaacccaggagacagaggttgyagtgagccaagatggtgccactgcactccagcctgggtgacagagcaagactccatctaaacaaacaaacaaacaaacaaamaaaaaaaacaagtaatgccacctgcaaatacctttgtcatttaccacataatacaaacagcgtaaacatggcaccttaatttttaagtacttaacaatttcttgtgtcaacagcaatgttttatctgtgaattttttcttcctttttctaccacagtggtttcagaactgttgcctgtaacttctctgtgatctttacctctcccatacttgacacaggaccaagaagaacttttctgattcttctcagaaattccaattttacgaggaaaatgcaaattctcttcatgttaagagaatctggctgattaaaacaaaacaacagaagtctcccagtctaaaaatattatttaaacctcctggatttgaaaggctaacgagtaaataaaggcaaaagtgggtataaatgtaagtgtgaacgtttaacatgtgcaaaaatccaaatacactatcctccactgacaaggattagtgattttaatgagtagagctgaggacagaaatgtaaacaggatgctagctgatgtgcttgctaacttgggttccttagtctgtgtgctttgccacagtgtttgcataagttagatcatgcatttgcattaactttaaactcttctccacttatcattcctgcaccaagtcattttagttccctggaagattctatgaaaagattgcttaacatttccataactgaaaagaaacctctaacagtgggtcatttaagaagcatatgcccttcctgcaattttgtttcttcacatatcaacttggtgtcctttttatcatcaatgaatccagtgaatgatctatataatcctgccctgctaatctagctataattgattttgatgagtcaataaacagatacgactgctttctccgactacatccatttgttaatcatccatgataaggaaaataatctgagagatcgctatttgccttatacttggagaaagagctaaacttaactttaaattgctatcaagggacatttatcctttgaaactctcctaactattccacactaaaagcttaccattaatctaaataaggtctacctgaattcccatgcaattaataaagcacaacaaaatgtggatttttcccttgaaggaggaagttcatagagtcccctgttagagatgtcatcggtgtagggcaaaaacatccaacaatacaaacaggtttgaaaataagtaggggagccacggagactgccttggttttaattcctggcttgtaccttactaacagaatgaacttgctcaagtcactgtccctctctgtaactcagttctctcctcttcctcctctgtaatatctgtctcatatggctttggccaggaataaaagtaagtgctttaaacattgcctggcacatagcaaaggcttactaaaagtcagctattctcgtaagtaacctggtaataccagcacttgtggatactgattaaaactgttttgggagccaggccaggcaagccgattgatgggggagggggtcaatcacttgcctccaagtggtgtcccaaaacaacagccgactcccacagcacagcccaccgtcaggatatcagagtagtagyatggctgctactaggggagagacagacagagaaacaggtggaagagagggaggtgggcaggcagaggacagaacaagcagggatggggaataaggcagaatgagaggcctaagtcaaaaggagtccttgtggtcccatgtcccctgtgattcccaggccaagagaaactcagtgagtttggcaaaaaggaattaacctcatagcacagtgtcaaaatgaaatagaaggtagaaaatgaaataaaagttaggcaaatatatgccaggcacgtaaatcaataaatgataagcagaaaagagacagcaagaactccagaaagcagtactaataaatcctgcaccaaacagcaagcagtctcaaaataatacacagccctttgctgaaaaaatataggtatctggacygcaggggctgtgatccacagtcattccctggatgcccactccaaagcttgtggcagccacccaaaacccccttctaagtcttgcttaggcaaccgggatagggaggaagtgcaacttgcctccgacaggggctgcaaagcagcatcccacgcccactgcacaggccgacaccaggaggtcaagctgcccaggcacggtctgcaacagagaagcacgcgggacaagggggtggaggggtggggcaggcgggacgtatgtaagaggtagggtgagggattgggagctacaaagggatgggggagcacacgagggaaacrtggagggaaactracacagagggggtggtatggactagcagggagagcatgggagcagacgacagaccagacctccatgtggggccacaggtgaaagaggggtggacatttggaggacaggcacaggctaaacagaggcatcaygtggccagggtaggcagacagggrgacgaggaagggagcgtggattagtgcgatgctgcttcagcaccacagccagcccagagcagaggcagccctcccaacaccctggacacacagccggactccttctaccacctggccccagctcatttcactgtctcaaccttacctcatataccccgcagaacacagacatgaatttgctgaggacagcagcacagatgctggcaatgtggasgaaggggccctgggagagggggagcgagggggcgggggtcagaggccagatggaggctctgcagcactcactggactaataatattccttactccaggcactgtgccaggggctggaaatacgggagttacacagaggtcctgccctcacgaggcctcatcccagagaggaagaagaggagaaaccagtgtgtttctcctctccagagagccagggtggaggagggtgggagggcacgtgtttagaggaaagggcctgaggagcctgcctaaagtagagctttgaatgatgggagggagggagccgcgcagatgtcaggaggaagaatgttccaggctgagaaaacagcacacaggcgccctgaggggcccagggcagagtgactgagggacagaaaggaaacttgtgagccaaacacaggaaagcaggggcacaggcctgcagagaggaggaaccagagtccacggtctcgaaggccacgcaagaagttctgataaggccgggcgcggtggcgcacgcctgtaatcccagcactttgcaaggccaaggcaggtgatcacccgaggtcaggagtttgagaccagcctgaccaatatggtgaaaccctatctccactaaaaatacaaaaattaccrgatgtggtggcgtgtgcctgcagtcccagctactcgggaagctgaggtgggagaatcgcttgaacctgggaggtggaggttgcagtgagccaagatcgcaccactgcactccagcttgggcaagcgagctagacactgtctcaacaacaacaacaacaaaactttcaattttgttttaagaggcatggaaagccttaagaagtttttgaccaggggtcagatgagactgatcccatttttaaaagatgcctctggctgctgggtggaatatggcagtagggggcaaagatgaacaccagcagagaacggaaggaggctgcaacccaccgagcaaccttgaaaatagcacagcctctttctcagtcctagttttctcagattcaagcaagagaattggtctggatgatctctaagacagtgttctcaaccaggggagattttgtcctccagggtccatatggcaatgtctgaggacatgctggtgtcacaactgggcgatgcagctgggcatctaggaagggtcagaggccagcaatgctgctaagtcccctccactgcacagaacagcctccccacagcacagagttttccagccccaaatgtcaggggtgtccaggctaagagcctgctccaagctccccaagctgtgtggtttttgtcattggacctcagttggaggaacttccaaagcatttccccttcctagtgtcccctggccctggccttggtcctgtcccctgatccacttccactcccagagctccctctagagttggtgccaccctggctcctgagggcccctcccagctctggcttcagtcatgccaggcctacctctttcyccacggggatgccactgcccaggcccgcagtcagggygacaaccttggccacaaaggctttcattgtgaggtattccttcaggacaaccccacgaagtattgtcttcatttcggggattccagagcctaaaagcgttgaaagattatgtgcagggtcaaggtgaaggtgaaaagggagatgaaygtccagaatatgggaatgggaattggagagggctgaagaggcagtggtggggaggatggggcaaggcagcacagggctgtgggtggggctggatgatgggggagacagacagggcccctctcaggccacccagctcaggccgagtctggtggcaagttctcaccaacagcctggggagagatgaggtggcagaagagggcgctgaagaggatgaggactagtggsaaggtgmcccagaccaggamctgcagaggaaggctgggctgcatctgcgcgyaggaccacttgtaggctgcggagacacatgcctggggttaggcagaacatggctgagcagccgtgtccacggcaccaggacgtgtacccggcatgttctcaggccgtgctccttctgtgtgccccttctgagatggtgctgctctcatttgacacatgggaagcctgagttatggaggcgacatggcctgttccagttggtggctgtgtcacgaatcccactggagtacagggtctggaggcctgggtgtgaccaaccacccggtgtgcccagaaccaaggggcttcctgggattcgggatgttcagtgctgaaactgggaaagtccctggggaactggggcaagttggccaccctattagaggggcatccactgcttgggtggcagtgagtggaggggcgtgagaagtggagcaggcctgggtctggtcttttctgggcctggagtcccacctgatccctctctgcgcaatattcgcttcccataacacaccctgcttaacattcgcttccgataacacaccctgcttaccctaggtagaaactccagaaacggctgtgggcaaaggtccaggttaaacctaccctgaaggcttttggcactgacgtagtccatgctccagctgaccagagccatcagcagtcccagaagcaccagaaagatccagtcttcccctaattttcttctcaccacctgtcccaggcrgtggatacaatctaggaagagatgagggaaaaaacaaacaaacaaacaacaaacaaacaaacaaacaaaaatatatatatgtagagacagagagagagagagagagagagagagagagagaaaagcagctaacgagtcactactttactttgggtgctatacccaagatgggaggggaagccttgggcccccagggtccgtatgtcttatgcactgagtttctcattacccctctgctgattgctgctccggcccctgcaaaaggcaccaaagcccagttccccatgaatacttgaattccttcctaaaactcatttcttggagttgtgggaggaataacagggaataggcaaagtgcgaaggaggtgaagagaggtgccttttccttaatacttagaggggccaagcatggtggctcacgcctctaatcccaggaatttgggaggctaaggcgggaggattgcttgatgccaggagttcaagaccagcctcagcatccttacaaaaaaagttttaaaattagctgggcatggtggcatgtgcctatagtctcagctactggagaggctgaggcaggaggatcacttgagcccaggagttctaggctgcagtgagctatgatcactccactgcacttcagtctgaatgacagagtgagaccctgtctcttaaaaacaattagaggagagtttttgtagcagggcagggagtacgtacgtgcaatgggatgcccaagttattctcctaatccctgtacctgtttctactccagatttctttattcctcagtccccatcaccttgacatttagaatagtgatcctcatccttgctgtccacggtagaactggagcctgtcttcttgggcatccctatgtcctrctccctgtctgagaattgttctttgtgatggccataaatctggacagagagagaatgatcagtgtctgccttgtggaagactaaaaaaataatagacagaggccagcagacagactcacagaagaaaagaacaacagctttttgaattctgggtgttgactgcatgcagggtgactttgtggtcatccctgccctctactctccaccctccattcccacacttcccaccctttcccttgttcattcatcctaccttctctacacccattctccaacctgtactcaccttgatccagggtagcctttatcaaggaggccagtttttgctttgaagcagaggtacagaactgtgctgaacccaggtggccatatcaatcaggtgttttgtgtcactgcgctttctgtatgtcccacaatttccccagaccacttgcattgacttttctcctaacatgaacagggtgaggacagactgggctaactagcagggcagtcttggttgcactttgccttggtgtgtctagccttacctgaggcacctcaggtcctctatcaagcttcaagaccatccacttcatctcccagtgcttgtatgcacacacaagaactagcccgaaaaggcaggtccatctacttcttcccacagctagataattagacccctacctgccccacatgtgaagaggacagagcagctcccccaggtctggtggccctccgcttccatcctgaggcagagcacgtgtgtctgtgtggggtatacaagagctccaaccacttttagcctgccccactcccactacactaactgtcctctggggccagggtcaggccaggccatgttgctggattctgggagagcctgagtagaagagatctgatttcacaatatgagcagcattttacaccgcagtcctgaacaagcacgcacatgaattgccctgctcatggctgtttgtcttctgggtcagtgaccgagggaggcagtgtttccttccaaaccctgcgtgggacccagagagagaacatacttcccagtggaagtcagacagctgaggctgtctcagctcctcaaggccccaggccagtggagacaaggaagggggttgcttcatatcatcatacctgggctgggaaaacacttaaagggccagatctgttctggctggtcccatgcagggcagggtgaggggagggcaagggagaagtcaaaactcaagtctacaagtgatacaatgtctgggatttgttaaaaagtattccaaggtggaagcaaggctcagtggctcacccctgtaaccccagcactttaggagcctgagatgggcaggttacctgaggtcaggagatcaagaccagcctgaccaacatggagaaacctcgtctctactaaaaatacaaaaattagccaggcatggtggcgcatgcctgtaatctcagctacctgggaggcggaggcaggagaattgcttgaaccagggaggcggagattgcggtgagctgagatcgcgccattgcattccagcctgggcaacaagagcgaaactccatctcaaaaacaaaaaacaaaaaacaaaaaacaaaaaaaaagtattccatggtgtgtagagtggtgagggtggggaagggaagaatagatggaacaatagtgacaaaatattgacaactggtgggtacttggggcttcactataccattccatttttgtgtaagtcttccataataaaaattaaacaaagaaaaactaatccaaactcttgtttacttttgagacctgtagaaaacaggccaattctactccccaaactaaccatagcttcccaacacgagaactgtcatcaggaagtgccataatggcactgttactcaagttgccatcccacccagatacaaccatgtacacgagtgagaacacagggccagggggaggggtcttccctcctgctgatcccacacagtgttcaaaggcctagtcagaccccgctgtctccaagaaaccttcccaatgctcgattccagcctacactgacctgtatgtccctcttccctactgggtccctagcgctgcctttgcaaatactcctgggggttggtcagggactgagagcagatccttttgacccccagtgctgagatcccctgcatagctcatgcctcagcttcccagccttaaacctaaaggaactgaaggctccctgttaaaaaaaaaaaaaagaaagaaaaaaaagccttttaagttctgaccagactgggcacagtggttaacacctgtaattccagcactttgggaggccaaggcgggtgaattacctgaggtcaggagttcgagacagcctggccaacatggcaaaaccccgtctctactgaaagtacaaaaatttgccaggtatggtggyaggtgcttgtaatcccagctactcaggaggctgaggaaagagaattgcttgaacccgggaggcggaggtcgcagtgagccaagatagcaccactgcactccagcctgggagacagagcgagactccatctcaaaaaaaaaaaaaaaaaaaaaagttctggccaactgccctctagacaaattctatcctctgttattctctgcattctttggagggagaggcacacttacttattaaccatgacctatctttttccatgacaatttcacaacctttcctttagttgtgcccatccccattccccctttcctaggtgttcatatcccaccaatcccacagcgggaggctgctcatccatagacactcctaattagcctgcatgcttctgttgctgggatcacatctctgcccttttccaggtgcctaacacttaataggttcttacttgatcatcttgcgacctaaaagcttgtacatctctgctcattttgacgttggtagatctttgatcactgataagcaattcagtctgttttctacacttgcccaattcctttcttctgccttctgcagaaagattcatgtttgtgtgtattctgcagagggtcccagaggcagaaatctggcagtgtctacctgtgggtgagggtgtgggagacagctcccagcacactgcagtgtgggctcctacgcaatccactccacgtaggttatgtaagcacgagctattcatgcatgtgaggctctgctgtttccccatatgatttgggtactctgttggtaaaggttgtatgaaagtgcatgcatatctctctaagtgcatacttaagtgagcccagactttcaaagattttcatattttgaacacatcaccacgtacttgttttttaarttaaaaaaatgtaacactgctccctcttttcacccaattcctcattttcaccagtctctggcaccactgtctcccctcatccatggctcccctctccccttagagcactttacctgtgtggggtggacgttgtggcgggggcctgcatccttccggagcctgtgctggaggcccccattctcagagggcagtccgtagctggtgcagtgttcaaagggcatatactggtactgggggtcactaccccaccagctttgttcacccccaygctgctgtgaccgggattgctccatattccctcccccckagccccrgccaggccttggcctgcttgcccctgtccttcccccagtgtagctccttaagcctctgctcttgctgtccccaaggcgtctggggcagcatgcccacctccagctatttatagacccctctccgtcacatgaccccccactgccacatctgatctgcttggggtcgaagcaggtgtgagtgcagtgtgggggtgggggttgggatgagaacctgagggacagccccacagggaattccctctgctgagccagtggcattgtcccccttcttagtcaccagtagtaggcttccagctccatgtcactggtccctctataaatatcgcctggaccaggatgagaaactgctgagtatgctctcaaacctatgtgtagagccggatctgcatggaagccctccagttgcccatctctcttcttcaggatgcggaaggtgaggggtgggtgctggataaagatgaagcgactcgaagttctggaaacactggcacattaactcacctgggaaagtaactggtgcctctctgccacatctcctggccagcttgttcccaactctgtgtccacccagggttctgtctggccagctctgccagcccatcccatgtccagcgttcttctctagctctttgcccttctgtctgccagaggctgctaataacagcttgggggcatcccctgatcccatccttatcactcactgggtgtggaacacttatgggaagtgggaagtcgagggtcggtaatagccttgggttctagaatttctcccacttcccagactgttaggtgtcagccacactgccaacccggagggactgagcttccatttggactgtggagtgcccacactggctccatcagatagataacaagggagataacaggggagaatcgaaagtagaaagaggcacagggaagggagaggtgggaaaggggtgagggcttctcatgacaagcccgacaaacatgaaagatgatggggaagtgctctctgctattcttcccttttcaggtcaataaatacttttttggccaaggacaaacttttcttcctggcatcacgttataaaaccaattttcctatgacatgtcttccctatgaactcttcactgtaggagaaaagatatgaactgagccaaagtaaagtttaggatgcattaccaagtggggtctgtcccaggacagtccaagttcagggactgcagggtagggacaccaaacatctggtctacaatgtgattttgacctaggctaaatggaaccacccaaagcaggagggaagccaatatcattaaaagtactttttctagggcctcaacatcattaatcatcaggaaaccaaaatcataatgcaatatcgcctcatacctgttaggatggctattatcaaaaaagcaagagatagccattattatggctatggatattatggttcatgcttataatcccagcaatgtgggtgaccaaggcgggtggaatgcttaagcccagcagttcgagaccaacctggcaacatggggagaccctgtctctataaaaattataaaaatcagccatgtgtggtggtgcacgcctgtagtcccagctacttgggaggctgagacaggaggatcactgaagcccgggaggtggaggctgcagtgagctgggaaggcaccactgcaatccatcctggtctacagagtgagattatgtctcaaaaaaaaattaaataaaaagatgagataaatgttagtgagaatgcagagaaaagggaacccttgtgcactgttggtgggaatgtaaactggtatagtcattatgaaaaacagtataaaagttcctcaaaaggtaaaaacagaactgccatatgactcagcaactcccatacatccaagggaaaggaaatcagtatctcaaagaggtatctgcactcccatgttcattacagcattattcacaatagcctagaaatggaaacaacctaagtgtccactaacagatgaataatgtcatgtgtatataaatatatataatggaatactattcaaccctgacaaagaagaaaatcctgccacttgtgacaacatggatgaacttggaggacattacgctaagtcaaacattgcagacacagaaagaaaaatactgcatgattgcacttgtatgtggaatctaaaatagtcaaactcatagaagcagaaagtagagggtagttgccaggggctgggctggagtagggggtgggagaatggggaaatttggtcaaaggatacaaggttcacttatacaagatgagaaagtcctggagatctaatgtgcatggtaactataggtagtaataccacatacttgaaatttgctaagagggtagatcttgaatgttctcacctccctgcacccccaaagcaactatgtgaggtgatggatatgttaaccggcttgattgtgatgatcattcacaatgtacacatatatcaacacatcaagttgtacattgttggaggccgcacaaatgtttcttatgattaggtacaattgaagcttgtcagtaacaatatgaacctgtgatcaattcagcagctgaccaatcgttacctccttcttgttcttgttacccagtaaatatgaagggctgagaagctcggcaggggagctgcctttgctcactagaagcagggagctctcttcttcttcatgttgcctttccttaaaacagtttcttttgtcttaagttttcatttctacattcgtccctttgttcggtcataatgatggtttcaagtggtaacagtagtaactgctgtaatcacggtctcaagtagtaattaaatatgtataatttctagttgtcaattatacaccaatgtagctaaaaaaaaaaaaaaacaaaacacctgctctaacaacaatcctacaaacctcaaggcctataatctctccaaaaaattacaaatgtgtgatgaattgagagactaaacattctgtgatgatacccaccttttctgcaggcagaaaataaggatagacatctatgggattggtatgagcagaaaggattactttcttaacaaagaaaatagaatctgtgggttcctccctccttctgagcctctaccctgcctgctgtgtgggagacaggcagagatggcaggtgagatcgccaaggctcaggtcgctcggcctggtggcaacactgtcttcgggaagatcatctgcaaggaaatcccagccaaaatcatttttgaggatgaccagtgccttgctttccatgacacttcccctcaagcaccaacacgttttctgttgatatcgaaaaaacatatatcccagatttctgcagcagaagataatgacgaaagtcttcttggacacttaatgattgttggcaagaaatgtgctgctgatttgggcctgaataagggttatcaaatggtggtgaataaaggttcagatggtggacagtctgtctgtcaagttcatctccatgttcttggaggttggcagatgcattggcctcctggttaagcacattttggtgataattttcccttctctgggcaatgattaagttaggcaagttccagtatgttaagtagcacacttattttttgcctgtgtatggagagattcaagaaataattttaaaaccgcatacataataaaagacattgttgcacacacaaaaaaatagagtgccaaggtaacactgcattccttggaggacttcagaaacaagattctcccatttgaggagtatagctttcctgaaagtgatcagttgctgtagaaacttgataaatataagcagcaagatatgagatacaattatgactttcttactatttctgagaaagacagggccctaaaacagagcagcctagtcatggactctgagatttgaaggcagagaccagtggagtagggaagtgctcacatccagccaagctgagtggaagcgtgtggtctagaaggaaagcaccaactgcgattcttaaaaccagattctgaaattaggagggtcaaagacatgtacagactgccagtgctggtgggcaagggtttgagagtaaatatcctgtgtttgaaattaggaatagtttaaatcccatgggtttaaatccctgcaagagaacaagaaaagaaaatgtaaaccatgcccactcctcactccatcatcccgctgggcttagtagcttaggttcttatttggaggcacaaagatgggcttctagggattcctgtaaggctcctgaatgtggaagcaaattcataagcatgcataaatgatatatattctttcgggttttatttattttatttatttattttttgagatggtgtctcactgtcacccaggctggagtgcaatggcgcgatctctgctcactgcaacctccgtctcccgggtttgagcgattctgtcacctcagcctcccgagtagctgggattacaggcacttacggtcatgcccggctaatttttgtatttttgtagagatgggtttctcaccatgttggccaggctggtcttgaactcctgacctcaggtaatctgcccgctttggcctcccaaagtgttgggattacaggtgtaagccactgcacccggcctcttttggggttttaaatagatcatcctagggtccattatacaaaaagtttaaaagcccataggcttatagaattgctatttgaaggaaaatcgtaaaaagttgccatgcaagatacatggaggagaagttttgtgttgggtataggtgaaagaattttctttctgggttacacccttgttttcagactctcacgtcttccagtctggcctccccagcatagtgggcagtaaaacccttatgttctttaaaggtgttttcagtcatcactttccctctgcatatccaggcagccatggaacccgtggccacctactttctgaaatttcagctaagctacaacttcctctgaagacactttgtattgtatgccactggcggtcatgtctcctctcctctttattgtggcttgcctccttattcttttttattttttttttttgagacggagtctcgctctgtcgcccaggctggagtgcagtggcgcgatctcggctcactgcaagctccgcctcccgggttcacgccattctcctgcctcagcctccggagtagctgggactacaggcgcccgccaccacgcccagctaattttttgtatgttttagtagagatggggtttcaccgtgttagtcaggatggtctagatctcctgacctcatgatccgcccgcctcggactcccaaagtgctgggattacaggcgtgagccaccacgcccagccagcctccttattctttaagcatccttagtcctttcccatcccctgcacgtcaggctttccctgtagtattcgacaggtctccttctcccccttctggcttttcaaacatgatacattttcccccaaactcctacctaattaggacttaagatggaataaggtttgggtctcagtttcattcccacagcccaatgggaggaatcttacagcccaaaaaaaggaagaaaaaaatccttcatgccagaataagtcacagaagcaaggctgttagcatacgctcaaactgacagctttggtttcacatcctgacctcagtttcctcagaaaggaagtaactagagggttaagaagataaaataacacatgcaaaaaaacatgctataggctgggtgcggtggctcacacctgtaatctcagcactttgggaggccaaggtgggtggataacgaggtcaagagattgagaccatcctggccaacatggtgaaatcccgtctgtgcttaaaatacaaaaattagctgggcgtggtggcgtgcgcctgtaatcccagctactcgggaggctgaggtaggagaatcacttgaacccgggagacggagattgcagtgagccgagatcacaccactgcactccagcctcacgacagagtgagaccccatctcaaaacaaaacaaaaatgtgctatagtgtttgattcatagtaagaactgttcactcatattaaactgaagctcattctgtgagtta

SEQ ID NO: 97631 - DNA, 16516 bp, Homo sapiens
gcgcccggcaataacagttcttttcaaagggtaaggtttgaatccaggtcttagaacagtgcctggcatataactaaataagggttatctctgattattattcctcaagctcagtttggtgaaccagatagatccacaaatgaataattatacaaacagtgaaatgcagttgagacaaatgcttctaagaactatagagtcctgagagggcataggaaggaggctgggggatgacctggcctggagagggcgttgggtcttttgggaagggatgtttgccatgagaatgggtaggaactggcctggcaaaatggagcaggaggaagagtattcccagccaagggagcaacacagggcaaggctatggccagggaaggggtcccagaggtttgagaggggtacggaaggtttagcaagggccaaggagtgtgggctttgttatagggacactggggaggcacagagaggggttaagcagggcaggagcatgattaaatctgtgtttttcttttcttttcttttttttctttctttttttttttttttgagacggagtctcgctgtatcgcccaggctggcgtacagtggcgcgatctcggctcactgcaaactctgcctcccgagttcacgccattctcctgcctcagcctcccaagtagctgggactacaggcgcccgccaccacgcccagctaactttttgtatttttagtagagacggggtttcactgtgttagccaggatggtctcaatctcctgacctcacgatccacctgccttggcctcccaaagtgctgggattacaggtgtgagccaccgcacctggcctgtgtttttcttttctgtttgttttgagacagaatctcgctctgtcatccaggctggagtgcagtggtgcgatctcggctcactgcaacctccgcctctcggtttcaagtgatcctcctgtctcaacctcccaagtagtaggattacaggtatgtaccaccatacccagctaatttttgtatttttagtagagatgaggtttccctgttggacaagctgggctcgaacttctgacctcaaatgatctgcctgcctcggcctcccaaagtgctgggattacaggtgcgagttaccacgcccggccgggaaggcctctttgaaggggtgacattggagtggacacctgagtgaagagtgggagccagccaggaagatatctatgaaaagcatattcttttttttttttttaagagacaaggtctctgtcacccaggctagaatacagtggcacgatcatggctcactgcagtctcaaactcctagactcaagccatcctcccctctcagcctcccaagtagcatgccactactcccagataatttttttttttttttgagatggagtctcgctctgttgcccaggctggagtgcagtggtgcaactttggctcactgcaacctccgcctcccgggttcaagcaattctctgcttcagcctcccgagtagctggggttacaggtgtgcaccaccaagcctggctaatttttgtgtttttggtagagatggggtttcatcatgttggccaggctggtcttgaactcctgaccttgtgatccacccacctcaacctcccaaagtgctgggattccaagtgtgagccacggagcctggccagaaaagcacattctatccaaagcaaacagcaagtgcagatgccctgaggtgggagcaagctctgcgggtttgaggaacccagaggaggtgggggtggctacagcagagtgagcaagaggtgaggggtgggagatgaggctggagaggtaacagggcacagctcgtgggccaatataaggactctggattatggctggaatgaggcgggagccctgggagggtttgggggagaggaaagagaatctgacatctagaaggtaaaaagatccctgtgatgaccaggcgcggtggctcacgcctgtaatcccagcactttgagaggccgaggtgggcagatcacctgaggttgggaggagaattgcttgaacccagtaggcagaggttgcggggagccaagatctcgccatgtgcactccatcctggggaacaagagcgaaactccgtctcaaaaaaaaaaaaaagatccctgtggctctgtgcgtggagtagagtgggaagacgagagggatgacaaatgtccaggcaagggagggtgggggcttgggaaaaggtggaggtagcccactaccctccccgactcctgctcctcacctgttttttggccctgctcagctccaggtcaagtgcttgggccagctccagcagcagggcacagggcacagccgaatccgtggcccctacaaagggggtcgatccgggtgggaagagcttcgagtcataatggcaggcaagggtgaggtgacgggcagcccttgggtccagtgtggccaccacattgccaaagtccactggccccaggggtgttgaggctgtgaagggatccagctccacgtgccaacctgctgtcagggaccgcagcgtggcctccaggaactagcggcaagagagaggtgggagggtggacggggactggggaggaggtggggagaagggccacgtgacctgagccatgcagagcagatgggttgacactaaagccccactctgattgaatggatttctttctttctttctttttttttttgagatggagtcttgctctgtcacccaggctggagtgcagtggcttgatcttggctcactgcaacctctgcctcctggcttcaagtgattctcctgactcagcctcctgagtagctggggttacaggcgccccctacaacgcctggctattttttgtatttttagtagagatggggtttcacaatgttggccagcctggtattcgaactcctgacctcaagtgatctgcctgcttcagcatcccaaagtgttgggattacagatgtgagccactgtgcccagccccctactctgattaaaatcattcccttgacagtgctggtgagtacctactgggtgccagatgttggggagaccccacctcttgaagccagcaagactcatcacagcttacccttaaatagctctcactgtgtgctaagccctcttctaggaaccatttaggggagggactgccaatacatgaccccattttacagatgaggaaatgggctcagagaggttaagaaactagtccaggccgggcgcggtggctcacgcctgtaatcccagcactttgggaggctgaggtgggcggatcataaggtcaggagtttgagaccagcctggccaatatggtgaaaccccgtctcactaaaaatacaaaaaattagccaggcatggtggtgcacacctgtaatcccagctactcaggaggctgaagcatgagatttgcttgaacctgggaggtggaggttgcagtgagccgagatcgcgccactgcactccaacccaggcgacagtgtgagactccatctcaaaataaaataaaataaaataaaataaaaaagaaaccagtccaaggtcacaatctaagtggatgaggtagcattgggactcaggcagtatttaagtgactttttttttttgagatggagtctcgctctgtcacccatgctggggtgcagtggcgcaatctcagctcactgcagtctccgcctcctgggttcaagtgattctcgtgcctcagcctcccaagtagctgggactacgggtacccaccaccacgcctggctaattttgtatttttagtagagatgaggtttcaccatgttggccaggctggtctcaaactcctgatctcaagggatctgcctgtctcggcctcccaaagtgctgggattagaggtgtgaaccactgcgcctggcctttaaatgactcttcatgctttctggaagacaacagatacattacagcaccagctcggagccaacctgtttgggttcaactctaggtctatgattttctaaacattgggtctcactaggttgactaggctagtctcaaacttctcaggtgattcttccaccttggcttcccaaagtgctgggattacaggcatgagccactgcacccggctaaggtctactacttattatctgtaggatttgtgcaatgtgtataacctctctgagcctcagtttccccatctgcataatgaagatcatattggtacccaccttatagggctgtctgttgcctatgcctagcacacagtaagcttttggtgggggcattaaggggggcagtacagcctggtggtttgttaccagcatggagtctagagtccgattaactccagtcagagccccagttcctcctcttagcttctttgggatcttgaacaggattcttatttcccattccctggagggctagggggtcagggactggaggtgggtccctttacctttctgacttggagatttcccgggctgcccggggttcgcacaaccagcagggggcgcagataagtgctccagagacgctgtggatccagttgtcccaccaccctccgcagccgggcttcggggaggcttccgatcaatgggaccttgggaaggaggtgggatagggaagggaagaatgagagcaacccccccatttcaaccctaccccgggcgccgtcacccgcgaggagccccgggttctcttcctaatctgccgcctccagcatcggagacttctaggataaatccaaggctcaggaaaagtccttccaagaccatccggtccagcctacctcaaacttgatggggaaatcgaggcccagtgagagagaggggagatggaggaagggactcttccaaatagttgactaaaggcgtagaaccctgaacccccccgtcttactatttcagacctttcctcttaaaaggaagctactgttgcagaaccagcccgaagccttattcctttggtaagggtcatgcgctcagatgacgaagacggtggcatctgcggttagggccgtacgctaaagccacgtcaaccctgggtaacagcggggagggaatgagggtccccgcggtgcccgggtccccgcccagcctcacccgcagctcccggcccagcggcagctcctcagtcctgcggtgccagccgctccaaatggtgtagaacgccgagcccacggccagcgccagcaacagaggcaagagccgaacccgcggtagcaggcggcgcttcggcggcaagagtggctccatgaggccacgttcccccagccgcaggcggggtcgcccgcggcccccggaacgcatggccgctttgccctgaaacctgtaccagaccacggattgagtttaggcccagccaagttcctccccatggaatcggtgggccaataagcaacagctgcggctgcaccagcccaccccacagcgagcagcgaaaccaataagaactacggtcctgaggacacgcctcccagcctcccttaggtattggggttggttcccctgagaatggcacgacccaaatgggagcgcaagagaagtaggctccgccttagcggaggagggaaagccaatgaacagcgtttgatcatggaaaatattcgatctcccgggcgcaggtccatgccccttccggatgtaggcaggggattggtggcgcagggtcggaaagatcagtagatacgtcagtaacgcgtcccagagggaagaggggcggtgcctgtctccgaagcgaggagcggattggcttcacggaggccgcgcccccgaagtcacggccggcgggcatttggaaatagcttgtcatttccctccttcaacctgtaccattcttcaagaaacggtttgaatcagaccgcctttccttttgtcttcattgtcataaacatctgcccccgtgtggttctgactggccgcgaacccctacccgaagcttttattccatcattgtgcaccgttggtggggaatgctgtggcaacaggccacgcctccacttactggttggctttgcgcaggcgccaacggaagtgggtcgcaggaagaggaagtcccgcctctctctcctcaggcagcagcaacgcggaggaaacgggagtgaacggagagcgtagtgaccatcatgtgaggccgggctaggcttaggcggcgggaatgaggttgagggtggatatttgaccgattgagtgtgggaagggttgagcagagcggggggggcaggggcagatgttttagggatgcagcgtcctgcttttctcctgatgagtttgagaacgggcgtggggcctttgacgcatcgtgacttcgggagaggggacagctttatcagataacgccctgggctgggcgcgggggctcattcctgtgatcccagcactttagtaggccaaggcggagcatcgctggaacacaggagttcgagactagcctaggcaacatagcgagacccccgtctctacaaaaaaaaaaaaaaaatttaattatgaaaaacatgttttaaacgataacgggagtggtcctagataattagtcctattgaaatgaatgttaaggggcagcgattttacgaatactgggggaggccgagcgcggtggctcaggtttgtaaatcccagcactttgggaggccgaggcgggcggatcacctgaggtcaggagtttgagaccagcctggccattgtggtgaaaccccgtctctaacaaaaatacaaaaattagccggccgtagtggcgggcgcctgtaattgcagctattcgggaggctgaggccggaggatcgcttgaacccgggaggcggaggttgcagtgagccgagattgcgccactgcacttccagcctgagcgacagagtaagactccatctcaaaacgaaacaaaagaaataaaacgaataatgggggagggaagttaggacttttagaaataattatttgaaataagggacttatcttgatcatttgagctggagacgggtgcgttttcgacttgattcacaacttacacggataacgaacgagtcattgacatgattttgcgcatttattagtgcagcagatattacattgaatgcttatgtatcagacactgcttaagctacataggatacatcagtgaatgaaacctctagtccccaagggaaaagaaaaatctttttctctttttctttttttttttttttttgagacggagccttgctctgttgctcaggctgtagtgcaatggtgcgatctcagctcactgcaacctccgccgcctgagttgaagcgattctcctgcctcagcctcccgagtagctaggattacaggcacccaccaccatgcccagctaactttcgtatttttagtagagaccaggtttcaccatgttggccaagctggtctcaaactcctgacctcaaatgatccacccgcctcgaccttccaaagtgctgggattacaggtgtgagccaccgtgtctggtcggggttttactttctacactgagatggggggaggatgggagggttttcttttgttttgtttgtttgagatggagtctcgctctgtcacccagattggagtgtagtagcacgagctctgtctcctgggttcaagcgatcttcctgcctcagccttcaaagtagctaggattacaagcatgcgccaccatgcccagctaatttttttttttttttttttttttgagacggagtctcgctgtcgcccaggctggagtgcagtggcgcaatctcggctcactgcagcctccgccccctggggttcacgccattctcctgcctcagcctcccgagtagctgggactacaggcgcccgccacctcgcccggctaattttttgtattttcagtagagacggggtttcaccgtgttagccaggatggtctcgatctcctgacctcgtgatccgcccgcctcggcctcccaaagtgctgggattacaggcgtgagccaccgcgcccggcctaattttttttttgagatggagtctcactctgtagcccaagctggagtgcagtggcgcaatcttggctcactgcaaccttcgctgctggggctcaagcgtttctgctgcctcagcctcccaagtagctgggactagagggatgcgccaccacacctggttaatttgtttgcatttttagaagagacagggtttcaccatcttgccctgggtggtctcgaactcctgagctcaggcgatccacctcgcgtcggcctcccaaagtgctgggattacaggcgtgagccatcgcatctggcctaatttttgtattttctaatttgtatttatttattttttgagacaagagtctcgctctgtcacccaggctggagtgcagtggcatgatctcacttcactgcaacctccgactctctgagttcaagcaattcttctactttaacctcccgagtagctgagattacaggcgtgcaccaccacgcctggctaattttctgttggttgttttttttattgttgttttgttttgttttgttttgtatttttagtagaaatggggtttcaccatgttggccaggctggtctcgaactcctcacatcaagtgatcaatccaccttgacctcctaaagtgctaggattacaggcatgagccactgtacccataccctgggagggttttgaagagtgacatgttatgatttaggttttagcacaaccccctcagaccactctgtggagaacagactgtcagggaacgtgggtggaggcagagagaccagaaagattccaggacagagatgacagaggcttaggccatggtaagaaacggccatttcctacagatttcatgtaggatgtgagggaaaaagaggaatcaagttgacaaaagagtttttgcccagagaactagaaggatggagttaccatcaaagcagatggggaacgctgtagatagggtaggcttgggtggttgggtgatctggatcccgacctgagacatgcagagttgaaaatgtctggctgggcacggtggctcacgcctataatctcagcactttgggaggtcgaggcgggtggatcacaaggtcaagaaatcaagaccatcctggccaacatggtgaaaccccctgtttactaaaatacaaaaattagctgggcgtggaggtggtgcatgcctgtagtcccagctcctcaggaggctgaggcaggagaatcgcttgaacccaggaggcagaggttgcagtgagccgagatcacaycactgcgctccagcctgggcaacagatcaagactccgtctcaaaaaaaaaaaaaatgtctgttaggcatctagctgatgatactcagaaggctgaacaggaggacagatgtggtgggacaaggttggggagacactgaagccaaggccctgatcacccatcctcacagctccagcctctcaactccagcctctctcacttattggttccatgtttgtccatrcaggagcctcctcaacaagcccaagagtgagatgaccccagaggagctgcagaagcgagaggagkaggaatttaacaccggtccactctctgtgctcacacagtcagtcaagaacaatacccaagtgctcatcaactgccgcaayaataagaaactcctgggccgcgtgaaggccttcgataggtgagtgctgggtcctgggaggtgttctccgcaggcctggagaggccactccagctccagtctgaagagctcaaagacagctgtctcagaagcctggggtgtatggccaggcgtggtggctcatgcctgtaatcccagcactttgggaaggcaaggcgggtagatcacctgaggtcaggagttcaagaccagcttagctaaaatggcgaaaccccatctctactaaaaatataaaagccaggcgtggtggtgcacgcctgtattcacagctactcaggtggccgaggcacaagaatagcctgaacccaggaggcggaggttgtggtgagctgaaatcgcaccactgcattgcagcctgggcaacagagtgagattctgtctcaaaaaagaaaatgataattttcaatggccctgtgaggaaggtaacgtsattatcttccctcttaaaaaggagcaaactggcacagagaggtgcagtcctttgcctcagcctcaacctaaggactggcagagttgctttggcagcttggtcatcccggcctagcacctgcacccttccccaagccatgctgctggagggggcgagcagcaggcagtagggggcactgtcagaggcacgccccycacgcccagtgcctcccctccctgttccccaccaggcactgcaacatggtgctggagaacgtgaaggagatgtggactgaggtacccaagrgtggcaagggcaagaagaagtccaagccagtcaacaaagaccgctacatctccaagatgttcctgcgcggggactcagtcatcgtggtcctgcggaacccgctcatcgccggcaagtaggggcmgcctgtctgttgacagaactcactcctctgtcctatgaagaccgctgccattggtgttgagaataataaagctctgtgtttttttctagtggtatctgtttccagagccttgggagtggggtggattcaggagggcttgggggaggcagctggtatcggactgaatggtgggagcaggacccctgagcaagtggagaggccctggctctgccccatcgaggcctcactttctccatctgcaaagcaaacagtttgcatggaaatgagcgcccagttgtggctctggagaacattttagctctcctgctttaatcttcctgagcttctccttgtcactctgttgctctcttctctacctcttataatgaattggcctcgcttgaccaaagtatcttttggggccaggcatggtggctcacacctgtaatcccagtactttgggaggtggaggcgggcagatcacctgaggtcaggaattcgagaccagcctggccaacatggtaaaacgctgtctctactaaaaatacaaaaactggctgggcgtggtgtctcacacctgtaatcccaacactttgggaggccaaggcgggtggatcacctgaggtcaggagtttgagatcagcctggccaacatggtgaaaccccgtctctactaaaaatacaaaaattaacagggcatggtggcaggcacctgtaatcccagctactcaggaggctggggcaggagaattgcttgaaccccggagatggaggttgcagtgagctgagatggccccactgtactgtagcctgggtgacagagtgagactccatctcaaaaattatatatgtgtatctttcagcctttctttatgtttgttccttcagcaaacatcccccaaatgccccctgtgtgtccagccctgtgttgcagtgcaggggcaccaggtacccaggagcctctggtctgccctgaaagacaggaggattagacaggtgatgaacgcagtcagtgccaccagcacagcggctgaggtgagagcattgcttaagcccagaagtttaggactagcctgggagaatggttgtgagttttatagacagtgtgatactatctctaaactaaatagataagaaacagaaaaaagggccgggtgcagtggctcacacctgtaatcccagcactttgggaggccaggcgggtggatcacctgagctcaggagtttgagaccagcctggccaacgtggtgaaaccctgtctctactaaaaatacaaaattagccaggcatggtggtgcacgcctgcggtcccagctacctgggaggctgaagcaggagaatagcttgaaccaagagacggatgttgcactgagctgagatcgcgccactgcactccagcctgggcaacagattctaagactacctctcaaaaaaaaggaaagaaaggaagaaagaaaagaaaagaaagcagtcagtagctaaatattactgctagtgatcctggctaacacttgctgagctgtttaggtgccaggccaggctcagcgcttttcaaacatcctcccaacagctctggcgcgggcctgttaatttattatcccccttttccagaagaaggaactgagacacagagaggcaatgtcactttgcggggacaaccagccaggaagtggtggtgctgtgatttaaactcacctccagagcctgtggcttcacccctgagctctgctgcccctcagattcaactgcattacccttgagaggaattctctgacaaatttggggagataaatggaggtgggaaagggaggtggtatatactggggggattaaggaaattccctgtgttgctctgacacacacatcgtgtgctccccatatctttgttttttgttgtttttttttttttttgagacagggtgtcattctgtctgccaagctggagtgcagcagcaccatcatggctcactgtagccttgactgcccaggctcaattgatcctcctgccggctttttgtagagatgggatttcactgtgttacccaggctgatcttgaactcctgggctcaagtgatcctcctgcctcggcctcccaaaatgctggaattacaggtgtgagccactgtgttgggccctccccccatatctttgtctctgcctatgtctctgtcctctggatataggcaaacacctgaaaggtgcaagagtttgcaggcctgaggtcagtgcacactcagtgagatgtgtgccctgctctgagctgtgaaaggcacagcctggggccgggcgtggtgcctcacgccctgtaatcccaacactttgggaggccaagacaggcggatcacgagatcaagagatcaagaccatcctggctaacatggtgaaactgtgtctctactaaaaatacaaacattagctgggtgtggtggtgcacgcctgtagtcacagctactcggaaggctgaggcgggagaatcgcttgaacctgggaggtgaaggttgcagtgagccgagatcgcaccactgcactccagcctggcaacagagtgagactccgtctcaaaaaaaaaaaaaagaaaaagaaaacaaaaaaaagaaaggcacagcctgagatacactgtgagcattgtggcagagctgggaccctgcagcagagagaggcctgatacacagaaggcaatgggttatggggttataaaggcgtgcatttactacatctaattggaaacaaccatctgtggggtggatactagagctatttttttttttttttttttttttgagaaggagtctcaccctgttgcccacaggctggagtgcagtggcaccatctctgctcactgcaacctccacctcccgggttcaaacagttcttcctcagcctcccaagtagctgggattacaggcgcccgccaccacgcccagctaatttttgtatttttagtagagacaggatttcaccatgttggccaggctagtctcaaactcctgatcttgtgatccacccgcctcggcctcccaaagtgctgggattacaggcgtgagccaccacgcccgacctaagtgatcccattttatagatgagatcgttgaagccaagagagggtaagcaacttgctcggggtcacccagttaggaaacaatggtactatttccaaacccggggagccaggtcctccagaaaaagtcttaactcttgggtagcaagatggagctgcagtgtcctaatctataaagttgggacaaggggcatgcaacaggaggtcacccggggtttggttctgatacaggaagcaacacagccctggagtcagtctgggttccattcctgcctgccttctcaggtgtggtattgacctgtaattactgggaaatggaaatcagtttccccaccttgcgggttggcacccaagattccagtcctggccgctctgctcagcttgtctgaatttccttcctcacctcctgccccacatgctttccaatgcgtccgcctccagagggtgaaataaaagtagaggtggcaggcatagccctgggcaaactggcccagcattgtccacacaccagcaccaggcacggtcctaagcgtcactcatgggcatgccaggcgaccctaggatgcaggtaacatctgatcgtatatgtcacagatcacatgtaacatggccacttggggactctcttaggagggacagtggcagcaggtgtcccgttttcttgtagcaacacatggataaatttgagtaaagccaccacgggcccctactccaccaggcagcctgcctcggtcatttccctttgtgacactgccaagaagatgcttctacccaagaaagaaaaaaagcaactgtttcttatactttatttacaagagccttgccctaaggcccccaccccgcgagaacccacaaggcagggtgtaggggaattgggcagcagggccgcaagcttgaaaaggctgagttcagctttggggcatgtcggtccagggagccacagaccccagggaaaatgctcgacaacacccatacggtaacttaagtgtgcatatgtgtagggggaggatttaggggtgagggtcttgtgggtgtatgtacaggtggtccagccacaatgagactgtcagcatgccccctcattctcccaggttccaggggccacccatctaaggacagtggggatatgcgtcctcactccgcagccagcagtggccctggctgctctggatataaagtttcagctgcgaggcctgccttgcctcacctgtgctccggtccacaccaaatcaccctctcaggacccagtgcctctcacattactatctccagctcgcccctctcctgagagctccagacccttacactcagtgtcctgtcatgtcctacaaacactgccagcctaacctttccaaagagcacacgtggttctccccctacccgaacccaatctctctatctttagtctctccaccatccaaagccaaggagtcctctctgctgctgtgtcctcatgtgctccttcatgaaatcctctcacctccaccttttaaacagcttcaaatccgactgcttcatacccctcagtggcctccatcctggtccagccaccatcacttcccacctgcagtcccctcctttctgggctccagcttccacccctgcccctgataatttgtcctcctacagggcagacaagaaggatctgtttaaaacattagcccatttgggccgggcatggtggcttatgcctgtaatcccagcactttgggaggctgaggtgggtggatcacttgaggtcaggagttcgagaccagcctggccaacatggagaaaccctatctctactgaaaatgcaaaaattagccaggcatggtggcggtgcctgtaatcccagctacccgggaggcttgaactcgggaggtggagggtgcagtgagctgaaattgcaccactgcactccagcctgggtgacagagtgagactccgtttaaaaaaaaaaaaaaaagccgggtgcggtggctcacgcctgtaatcccagcactttgagagacccgtggtgggaggattgcttgagcccaggagttcaagaccaacctgggtaagagtgacatcctcattttttaaaaaataaaatattacccccaagagacactcctaagaatctccaatgcacctgaaatgaaatcccaacttgggtgcccctgcccacttctctgtctctccccacctgttggctctgacttaattctactccagccaaggctgagcgccttcctgcccaagggcctttgcctatgctatcgcttccgcctagaatcctgttctccagctctccccaaagtgatctctttcacctctttcggggatggcttaagtgtcacctccttggagacgcctcccagaccaccctaggcccccttctcgcttcccttcataaccattccatagcgtgtgtggaacttgatgttttgtgttcacggtctgttttccccactcagttgtcatctccagaagggcagggaccttttttctgtttccttcaccatttccccagcgtcctccgtactgggcctggcacgcagttggcactcaataaatccatgctaactgaacagacacggggatcccgccccctagcagtaactttccaactcccggctggcctcattcccaggccctgggagggtccccgaggacaagccgcggctggtggggacctcgcccgggccggagccggagggcagggcccggaaggcgcgctccgggagctggcgttgctcctcgcccaggctgcggcgcaggcggcagtggtgccagccacggcggatctccgactgcacctgtgagacgatggcgctcagaggcggcgccgtaccccgcgctgccgccagagggcgggggcggcggccgggtctctgcctacctccttgttgatgaagcagtagaggacgctgaccaggaagccctgcccagaggaggcgcggaggttacatcgctggtgggggcaggactgtaaccgcctccgcgcctccctccccgttttttgtttgtttgtttgtttgtttgtttttaagagtcggaatattgctcttgttgcccaggcgggag

SEQ ID NO: 97632 - DNA, 32225 bp, Homo sapiens
cttagtgacagggaaattgaagccagtgaggataagggatttgcctgatatattttattcctcttttctcttctttctttctctttttttcttttcttccttcctttcttttctctctctctttttttttagactgggtctcactatgttgcccaggctggtctcaaactcctgggctcaagggatcctcctgctttggcctcccaaagtgctgggattacaggcgggagccactgcaacccagccagcttgctatattaatacattcctactcccagccctgaagcattgtgcaaggcatgaggagggagacgcagatgcagagaagagactgtgattcccctccaagaaatgtgagccggcaacgctctgcagtgccccatcagcccaagtgcttcccacatccaagaataagatggaaacattcagggaatgctaatgaccaattctaaggcctagacgcacagcagataccatcaggacatacatgagtatgatccaggtcttagacaagagaagctgtaatggggcccagatagctaaggagaatttggagatatccaaagatgtatagtggtggaccaaggcatggagtggcatcagggaagaaatgggagggaggaagctgggtttagagccccaaggcctttgcatggcagaggtgggagtttggtgattatcatgttgatgagggaggattgttgacaatttctcagtagctgaaggaggtatttgtcagttttctttgagtcgtgagagatggaagcccaattcaagctgggaaaacaaaacagggaatttactgggccatgtaattgaagagtttagagtcttaaggcatggctgcatctagttgtcagatgatgtcatcatgaatggtctctttttattttctccgagttggcttcattacctttcagggtctcctcctaaggtagcggagacttgcagctccaggcttacaccccagcagcctgtcctccccagtggagaaagtttgccaatttccccggagttgcagcagtggtctttgggggctggttctcattggccacaccaggtcacatgctgaccagtcactgtgtctgattggccaggctggggtcgcacttggggttggggtccactccattcaaaccttaatggattgtgagatgggatatggtggtccctcaaaggaaaaggaagaggtgccaggagacaagacagaatttctcattaccttctcccacattttgtgttacagaaggggcaggatggggctgggaagtccaaccccacgcatttgggctcagccttggacatggaggcctgacagctgttgtcctttggggatcctttgcttctctggggcctcaacagaactaaagaagaaaaccgaccctttccccaactacatgtaccagcggaaggaaggaaggccaatgtaggaacccaaaatgcttatttcttcttctcttacttccctctcacagaaaagtcttacgaatggggaaattccaccaacatccagaccaaaaagaaaaaagcccaaatcgaaaaaaaaaaaaaaaaaaaaaaaaaacaaaaaaacccaaccaaatgtttttgaaatattcagagccgaacagattctgagagataacccagtccaataacctctttccttcttattactcatctgtttttgaggggaagtagagttttgattattaaactttatttacataagtgattccaaatacattttcttgtaaaaaacaagaagacatgttttgcctagtctgttagcaaatacgttacagggcacctgctgtgtgccaggtcttagcctcacagtcatgaaccaggctgacccaccaagatccttgccactgtggggctgacctcttggtcaggagacgcagcaaacaagggaatcaataaataaagtcatctcgccaggcgcagtggtccacatctgtaatctcagcacttgggggagtctgaggtgggaggatcacttgagcccaagagttcgagaccagcctgggcaacatagcaagatgcaatctgtaatttttttttttttttttttttttgagacggagtctcgctctgtcacccaggctggagtgcaagggtgctctctcggctcactgcaagctccgcctcccgggttcatgccattctcccgcccagtctgtaattaatactaaaaaaatgaagtcatcttgcacactgacaagtgtcacgaagaaaataaaacaggaggatgtgttgagaaaatgactaggggagctacttcgggttttttactttttccaatttttaaaattttgatttatttaattcaggtagttttgaatgggtaataaattcacttggtttgaaatgcaaagagtgcaagatggcatacaatgaagtctttctctatccctctcacacttcagccactcaattttccgtggtgggggaggtggcttttgaaacaggggaatcaggaaaggtctctgaggaggggacagttgagcagagacctgacagagaagagtcagctccgcaaataccccaaagagtgttctaaggcagagggaacaatcagtatgaaggcttagaagcaggataaaatttcccccctttttttttttttttttgagacagagttttcactcttgttgcccaggctggagtgcaatggtgcaatctcggctcactgcaacctccgcctcctgggttcaagtgattctcctgcctcagcctcccaagtagctgggattacaggcacgtgccaccacaccaggctaactttttgtatttactacagacagggtttcaccatgttagtcaggctggtctcgaactcctgaccttaggtgatccacccaactcggcctcccaaaatgttgggattacaggcatgagccagccaccaggtccggccaaatttggcattttcaagacagacttgagacctcccaagtgcggtggctcacacttgtaatcccagcactttgggaggccgaggcagcttgattccaggaattcgagaccagcatgggcaacatagcaaaaccttgtctctacaaaaaaaaaaaaagatctctgtgaccaccaaattaaccccacactctctatctcactggtaacccttgcaatgagtttaaagtggactttttacatgtattaatatatggtattctgggtgtttccttgatttttttcattcccttcgtatctctggcaactttttatccacttaatggatgttttcattctatgtcacccacgtcatttacacacttcatgccacccgtttttttaagagacaaggtctaagtctgtatcccaagctggagtataatggcgcaatcatcgctcaccacagcctcgaactcctgggctcaagcaatcctcctacctcatcttcccaagtagctgggaccacagatggatgataccacacccagttaattttttttttttttttagagatggggtctcggccaggcgcagtggctcacacgtgtaatcccaccactttgggaggcccaggtgggcagatcttctgaggtcaggagttcgagaccagcctgaccaacatggagaaaccccatctctactaaaaaatgcaaaaattagctgggcttggtggtgcatgcctgtaatcccagctacttgggaggctgaggcaggagaatcgcttgaacccaggaggtggaggttgcagtgagccgagattgcgccattgaactctagcctgggaaacaagaatgaaactctgtctcaaaaaaaaaaaaaaaaaaaagagagaaatggggcctcactatgttgtccaggctggtctcaaactccctgacctcaagtgatcctcctgccttggcttctcaaagcaccaaagcactgggattacaggcatgacacaccttgcccagtccacacctccttaagttgctgctcactccgtgcttcagaaaaggatgtccaagggtttcactattccctgccctcatcttttttttgttttgttttgtttaattttttttgaggagtcttgctctgtctcccaggctggagtgtagtgtcacgatcttggctcactgcaacctccgcctccggggttcaagtgatcctcccacctcagcccctcagccacccaagtagctgggattacaggtgtgtgccaccatgcctggttaattttttgtttttggtagaaacggggtttcaccatgttggccaggctggtcttgaactcctgacctcaagtgatccacccgcctcggcctcccaaagtgctgggattacaggcgtgagccactgtgcccagcctcccctgtcctcttgatgaacatttaagctatttccaatttcttgctctcacatcactgctaccgtaaagatcgttatgtacatatgcaagcgttctcttacacaggggtcttgctacctgttttgtacagcacttaagctaagaagagttttttttacagtttttaagccttgtaagaaaaaagaaaaactgaagagtgtgtaaaccagaccctatgtctagcatatctaaaatatttcctatttgaacttttacagaaaatgtttgccggctgggcctggtgactcacacctccaatcccagcactttgggaggctgagccaggctgatcactttagcccaggagtttgagaccagcctgggcaacacagctaaaccctgtctctacaaaaaattagcctggcatggtggtgtggacctacagtcccagctactcagtgggctgaggttagaggatcgaatgagccctggttatgctactgcgctccggcatgggcaacaaagaccctgtctccaacaaacaaacaaacaaaaaaccatgtttgctgactgttgttgtagtgtaggtggcacccagaaatgccacccctcctatgtcacagatgggaaagctgagacccagagaggagaacacagttacccaaggtcacactgaactggtaactcattcaactaggtaagtttgttgagctgctgagccgggcgggcctggctggggtgagtgaggtccagaaattgattaagtcaactgggtgcagtggctcatgcctgtaatcctagcactttgggagactgaggcaggcagatcacctgaggtcataagtttgagaccagcctggccaacatggtgaaatcccatctctactaaaaatacaaaaattagttgggcttggtggcccgtgcctgtaatcccagctactttaggagggtgaggcaggagaattgcttgaacccaggagggggaggttgcagtaagcggggatcgagccagcgccctccagcctgggtgacagcgagagactacatctcaaaaaaaaaaaaagaaaaaaagaaatttagtctacccattctcccagacaactcagcctgaggaaacacactgagaaacaatgataacctccgaggaacagggttcaaggtctcccagagtggggtggagaaggggaggggaattaatgtcaaagcttggcctggaaggatgacgtgctccccaggtaaaggaggtcaggacaacatcaacatccggacatgggactcggcttggacatacgctggaaaagtggattctctcacatagtcagctggccctgagaattgttggttttacactcagaccttggtggctttccgggttctgggggctcaggcaagagggccataggccagattcattccctgtctccaggcctcagtttacccgtgtgtaaatgtggaactaactgatttcccagggctcgggcgcctcacccgggccaggtggcgctctacccaaggggcgcgaccaaatcagtgacgtcactcggggcggggccggcaagacacgctgcggaagcctcagagggtgtctgggctcagcccggagccggcgtgtgggggcgggggctcccgggagggtctcctcacctccgggccctcctgagggctgggatgatcctgctgtcctccgcaggcgaaactgagtcagagcggggcgtgcgtgggccggaggctttacacaccaaagaagccggcgcctcctgcccaccccgggcgaatgccgggccccccactcccgcactcctcgccagtccccacctccaccccaccccacccccgaccctgcggctgtgagtcagcgaccgaccgcgcccccttggcccacttcctcctcaccttcccggggcgggcggggtggggtgagaggggttgggccctactcccccgacttccactcccgtgcgggtgggggtctcgcccccttagtaacctctccgaaattgacagaagagaaacgctggggaggggcggtgttccgaagatgggatttcagggagaaaatctgagaccacttgcttaacttgagggtcctcctcgacccccaaaattgagcggagtacgagatggagaagtcgatggggaaagaaatcgcgccccttccgagaccctcctcagaattcccacagtgggagcgaactrggaagcaagggaggtccccttccccttcaccaacttgcccctcaggtgggggtgattcccagggtgcacccctgggctacaacattggggagaggagcgagatcgcggaagccgagggtgcagagttgcccttttaagcgccctccaccccctcgcctggaggcgcacgcggcccctttaaggcgcggggcattgtgggtgcggggagtggaattttggaacgaaatgtaacgaagagaagtacagtagtaagagtaacactgtagccgccaccggcaaggggtgcgcgctggggagcggacgctgcatcccctttctgctgcaggaacctctcatcagaccgcctgagggaagcggcgcccggagacccgccccggcccggtccacattctccccaggaagccggactctatggggcgggaccctgggggagcctgagccgagcccggagccagccccgaacccctgaacctccagccaggggcgccccgggagcagccagcccgtgggcgagccgcccgcccgccgagcagccatgaggtgagccggacctgccccccgacccgtccccgcccgggcgggctccgcgccccgcctttgtccccctcccccccagctagctccgggctggaatttggggacagatccttgggagcctcggatttgagctgaatccccttggacgcgccccagaaccgtcgatcacttctccacgactgactccccaagctcggggggtggtggcggtgaggttctcctgggagccctcaagatttgggggcgctcggaggactcccgaattgttaagactttttttagaggacctcaaagttggcagcgactccccgcagggatgccaggattgaggcagggctcagactctcctccccctccccccagacttcagctcgaggtccgggaaggattgtgggggaccgatttgggataccctgggacttggaagagagactgagactcagaccctgggtgtgcaggtcccccgtttacttggtgctggaaaaagtctccccaagtgggaccgcgctccataacttcgggggtacttcttaatcccctggattttgggggtcacttaggtcttcctgtggaggaggctggtgtgaaccgatccagggacctggacgcagcctccagagtctggtgggaccccccccttccccgtcgctccgcacacaatctgcttaactggccgtgcctaggaccgagcgggcgctcggagcagagggcggctccccgcctcsggccataagggcggcccggctcccccacctgcgcggccctggggagggagggggcgcggcagctggggaaagggggcctttgtcttcctgactcacctgtcgagacagctggtgtggggggcgggcaccaagcgctgtaggccggctgccttccccaccacggcccctccccctttgctcaccgtccccctatccacccggagccttggggttggaggagggggagctggaaagcttcaaggtcatagccctcttccctagggacccaggcttcccagataattccagctatcttcccaggaatttaatcctgggggtggcggcccaagggacccagggatttggtctggccggggcctcccccgaactcctgggctcacctgagggcggggccagtgtgggcaggggggcccaaccatcccccctattcttccctcccctggccccccataatctctcccatggggccagagcctgacaatactatctcccttcctctactctctctgggacttcctgccccaaagcccccagcctgagcagggaggcccctggggacggttggggattaaccccgtggtgcccacatcccccgcatttcctgaacccctgccctttgacatcggagtggcgtggcattcctttttatgaccactagagaatccccctcccgcgtttgttccttctgatgtgaaaggcatggctggaaaatttggagcaaggaggacacccacagataccctcaagacttcctgcctatccgctccccattatagcaacatcccttccaagtccgccctggagaggggtcagtttagggagcgtcgctctcttccttcgccctcttcctccgggactcttctctccccttgccccccagccccgcccctccaccccccctcgcgtttccggtcccaggctcggtggaaggcggatggcggatgtccgagttagtgctgcctcactcactgcaaccgtaaaagggcaggagcggtgtctgggccggccccctgtcctmcccaccaccaccaccaccaccagcaccagccctggaagccctggccctcccacaaggcccacctcttgctgtggtggtggccaagcatcccgtcttgtgggggtgctggggtggggtgcggtgcagaaatgaccagatgcctgtcccaccaaaaggccactcccacctttccagggggtctcccctgcaggtggtcacacccgacttcctgggctgtgcctcttctccaaggacagccagrattcaaaacccatgcccctattacccagctggggaaactgaggctcaaagagaaaaagacatggccaagatccctcagaaattcctaggcaacgttggaggggtggaggagcctaggatcctctgatttctggctggtttggctggggacagtcctgggggcagttggaagagaggatgttaagatggaaaattacaagatatagttctttttctcccagtttgacaaatatttgttgagtgttggctgtgtccgggactggagctggggtgctgggaagacagagaagcgaggcagaggtctagaatctcagggcagaagggacttggggagaactggggtccatttctttcttcttccaataatagctatttttatttttaaaaaataagagaccatttgatcaagcatctattttatgtggggcatttttgtgcctgacagcaattctggctggtttttttgttkgtttgtttgtttgttttgagacggaaattttgctcttgttgcccaggctgttgtgaaatggcatgatctcggctcactgcaacctccgtctcctgggttcaagcgattctcctcctcaaccttccgagtagctgggactacaggtgcctgccaccatgcccggctaatttttatatttttagtagagatagggtttcaccgtgatggccaggctggtctcgaactcttaacctcaggtgatccacccgcctcgacctcctaaagtgttattattacagacgtcagccaccacacctggcccctcawggcagttcgaacaatgataytattacaaccttgtggcctccccaccccggtactcagtttatagatggggaaactgaggcacaggaaagttaggcaaggtgcctattaaactcaaacagggccaggcgccggggctcatgcctgtaatcctaacactttgggaggccaaggcagaaggatcgcttgagcccaggagtttgagaacagcctgggcaatatggtgtaaccccgtctctacaaaatatacaaaaattagctgggtgtggtggcatgcgcctgtagttccagctactctggaggctgaggcgagaggatcgtttgagctggggaggttgaggccgcaatgagtcatattcttgccactgcactccagcctgggtgacaaagtgagaccctgtctcaaaaaaaaaaaaaaaatagagataacatgctttccgtgttcttaatgaagaaaaagaaaaaaaaaaaggaacgtgctttcactgtgaaaactcttaagataattcagataagccaaatgaaaccgaagctgcaacatttatcttcctattcacttatgggaaactgaggcccaccaggaggaagggactagagtagccccatccccgacaaaagaagatttgtcgtttggaagggtggtgtatatgtatcataggttttatggtataaggagggtatgggctaagtcttgggttcaggggacagtgaagggaagggtaagactgcaagttttgtgaaaaccggattcaccatgcttgattacctctggtgatgggaagctctctccttcatgtggagcgtgtaccaagttacagttcctgcgtttagggctttttgtccattatctcttttaatccttacaatgaacccagtgagttattgtttccagggctggaaactgagtttcagagaggcaaagccacacaacaaggaggcaacttgaaccgtcttttcatccgccatgtgctagagttttccaaaatgtggggacttgcagggaggagtgggtcctgggctggctggaaaattaaagtgttctcatgtccaatggagggttctagacttcgggaaaacacactggaaatgggcagaactcctttccatctcacagcccccgcacccccgttttatggctatgggattttcgttctggcttttgtgtagtttacagttttatttattgaacttaagtagtgagttaggtttttataggtaatttcaacccatgataagaaaacaaataataagcagtttgaaatacttactgaaattattgaaatggtggctgggcctggtggcttatgcctgtaatcccagcactttgggaggtcgaggcaggcagatcacctgaggtcaggagtttgaggccagcctggccaatgtggcaaacgcccaaaccccatctctactgaaaatagaaacattagcctggcgtggtggcacacgtttgtaatcccggacactcagaaggctgaggcaggagaatcgcttgaactcgggaagtggaggctgggaggctgaggcaggagaattgcttgaacctgggaggtggaggctgcagtaagctgagattacaccactgccagcctgggtgcagagtgagagactctgtctcaaaagataaatggtacaaaatatttgtttcttccctccccagttcctgagttcccctcaatggaggcagccacagttagtgtcttgggaaacagtctctgcatatatcaccactctgagtgcagatatatttatatatgctcctcactgtttttttttttgagatggagtcttgctctgtcgcccaggctggagtgcagtggcgcgatctcagctcactgcaacctccacctcccaggttcaagcaattctcctgcctcacctcctgagtagctggaattacaggcacgcgccaccacgcccagcaaatttttctatttttagtagagacagggtttcaccatgttggtcaggctggtctcaaactcctgacatcaagaggtccgcctgcttcggcctcccaaagtgctgggattacaggcttgagccactgcgcctagcctaccttttttgtttgtttgtttttgtttttgagacggagtcttgctctgtcccccaggctggggtgcagtggcgtgatcttggctcactgcaacctccgcctcctgggttcacgtgattctcctgcctcagcctcccaagtagctgggattacaggcgcccgccaccacgcctggctaattttttgtatttttagtagagacggggtttcgctatgttgcccagactggtctcaaactcctgaccttgtgatccgcctgccttggcctcccaaagtgctgggattacaggcatgakccaccgcacccgaccttttttttggttttgtaaagcctctgatcaacactaccttgtactttggcttttaaaaatttcaatttagctctgcttcttcatctttaaatgaagttaagaacttgtgggaacttcgtttcaactatgagcccctctgcttacttgctgtgtgatctsgggcaagtgccttcactcctctgtgcctgcaattcccccttgtcaaaagggtgagcgtcagagcctatcccatgaggttgtagagtcatgcagcagggaaattggtgtcaagcaccaagaagagtgtctgggacccaggctgactgagaaatgttaggtgtcctaggtaaaagtttgcctttttttgtgagggagtcttgctctgtgagggagtcttgctctgttgcccaggctggagtgcaagtgacctgaacaaggctcactgcagcctcatcctcttggactcaagtgatcctcctgcctcaccctcctgagtagctgggactacaggcaagcgccaccacacccagctaattttaaagttttttgtacagacggaggtcaccatcttgcccaagctagtctctctccttttttttttttttttttttgagacagagtctcgctctgtctcccagactggagtgcagtggtctgagatcggctcactgcaactgcctcctgggttcagtgattcccctgcctcagcctcctgggtagctgggattacaggcatgagccaccatgcctggctaatttttgtatttttagtaggcatagggtttcaccatgttggccaggctggtgtcgaactcttgacctcaagagatccacctgctttggcctcccaaagttctgggattacaggcataagccaccacacccagccttcccaagccaatctcaaactcttgggctcaagtgatcctcctgcctcagcctcccaaagtgctgggattacaggcgtgagccacctcccctggccaaagtttgcctttttttacagatgtttcgtaactattgagtccctactatgtgttggacgccattctaggttctggggacacagcagtgaacaactgggacacaaatttctgcctttttggcagcggagacagacaaatattgtgttgggcaggggtcactgctatgaaatgtgcagcaggggatgaaaaggagagaagcgtttccagctaagggagtgagggacggcttcttggaaggggtgacatctaaggagagacctgaaagtggggagaggctaggcctgaggaagaagcagcacacaggcccgaggcaggaatgtgtctggcctgcgggaagagcagcatgggggtaggaggtctagggtctggaacagagtccccaagggacagtggagcgggaagaaatgagatctgaggacacacagatcacggaggccctggagagaacttggcattgattccgtaggagcctggagccttcaagaagaagaagagacatcccaccttgtaggtttttgttagtttgttttgttttttagagatggggggtctcactgtgttgcccaggctggtcttgaacttctggactaaagcaatcctcccgcctcggcctctcaaagtgctgggattacaggcatgagccaccgttccccgccccacctcgtgttttaacaggatccttctgttacaatgggtatagtgttccctggagaggggcaagaccaccccttggtcacccagcaggcgccctgttctccggccagtccagagcctcagtagggcagggctgcctgggagagcaaagtgcagccagggcggggcagcagcagccccgggctcctggccagagtcggccctgggtgtgggtggcaggtgtgggtgaggccgaggccttaaccctgccttgccaggggcagcaggagccagaaacagcccccgaggctgtgtttgtctggaaagggcacctggtgtttgggtggggcccacacagttcccggtggttaaggcttggaagcctgaattcacatcttcactctattcctcagtagctgtgtgactgtgggcaagtcactcaacctctctgggcctctagtcctcacctgcaaaattagaatgagtggctctctggataagctgcagtgagaataaaatgagtgactttgggggaggggcttaaggcccctgatccacctgaaatgcctagtaagagggagatggcacaattaggtaaatttgagggtccctaccccaggtccctacccacagctgagtctgcctagggactttccctgccctgacttcccagcatcagtgtcacacccagcccccagccctcctagagacagaggctttgcggggggtgtctaatttctgtccccggaaacctctgaccaccaacttccccatttcaggaaaaagcctggtgtgggtggggtggggaggagaccagtgcttccccttcccctgtgtgaccttgggcaagtcacttcctgtttgagttcctgtctaggcctgagtttcctcactgggggagaggggattgaacctcccagaggggctggtgggagggtcccgagggttgtagctgtcccgggccccagtggtgcccatgagagggatgttgacagttactgagctctcggcgtgtgctggacgctgtaccaagcacttagctttttttcttttttttgaaacagagtttcrctctgtcgcccaggctggagtgcaatggcgtgatctcagctcactgcggcctccacctcctgggttcaagcgattctcctgcgtcagcctcctgagtagctcagactacaggtgcacaccaccacgcccagctaatctttgtacgtttttgtagagacgggatttcaccatgttgcccaggctggtctcgaacacctgagctcaagcgatccattcacctcagcttcccaacatgctgtaattacaggcgtgagccaccacacccggctgtaccaagccctttaggtgcccagattcatgtgcccctcccccaytgccctggaggtggggactgtcattttcccagttcacaggcaagaagaggtcttgagtgggaaggtcatgtgcctgagtcacatgaagtaggtggctcagtggggatttgaacccaggtctggggatatcagctcctgaactctgcaccagtttactgacacctcccacccaggytaagtcagacgttgccttttccaggaagtcctgcctgactctccaggctggggcaggcrttccttcagggyacccccagaccctgggctccttggtcctawmcctgggttggtaccgtctggggacagctgtgtctcccacactggactgtgagccccaggagggtggtgccggagctgtctgggtcactgctgtgtcttcatccccagccccacccaatataggccagacacagagcagggagtatctggggaatggccgctagtgccctggggagccaggcgakgggtgggcagcgggaagtccctttggaggaagagctcagaggtctgggatgggtccccaacctgctgcaggcctcacacttcccctcccaagcctcagcttcttcctgagcaggcagtggtggaggggggtgcgtagagatagggaaactgaggtcaggcaggggctggtccctagtgcagctctgggctcttggcctccttctggcccctctgtcttccctcctgccctctgctctgctaacccgcatccccccactggcattggcctcggcctcttacacccctcagcctgtctctccatctttatcttttccttcttattagttttgttgtgttgtgttttttatttttcattaaaaaagtttttttgtggactgggtgtggtggctcacccctgtaatcccagcactttgtggggctgaggcaaatggatcacttgagcccaggagttcgagaccagtctggccaacatggtgaaacctcgtctctactaaaaatacaaaaaattagctgggcttggtggtgcatgcctgtgattccagctactcaggaggctgaggcggagaatggcttgaacctgggaggcagaggttgcggtgagccgaggacagcccgggtgacagagtaagactctgtctcaaaaaaaaaaaaaaaaaaaaaaaaaaaagattagtcgggtgtggtggtgcatgcttgtagtcccagctacttgggaggctgaagtgggaggatcgcttgagctcaggaggtcgaggccacattccaacctgggtgacagagagcaagactctgtctcaaaaacaaaaataaaaataataataattattattattattagagatggggtctcactatgttgcccaggctgctctgaaatgcttgggctcaagtgatcctcctgcctcaacctccaaagtgctgggattacaggtgtgagacaccacgccaagaccatctttatctctttctgtgtctgcctcttcctccaggtcccctgtctgcccatcctttttccccacccctcccccatctgttcatctgtctgtctgccttcagtctgtctctcctctttgtcaacccgactctccctttcccacctctctctgcgtctgtctcttgcatctcgtttgtgtgtttgcctgtctctcctgatctgattttctctcctgatctgtctcccccgtctccttctgtccacgtggctcctgcctccctctgtgtcactctcttccttccacacactgtctttgtcccttggaatctcccaggagagacccagataagaaggtgaccggcccctctcccttttcctcccgcctgcagcgagacggtcatctgttccagccgggccactgtgatgctttatgatgatggcaacaagcgatggctccctgctggcacgggtccccaggccttcagccgcgtccagatctaccacaaccccacggccaattcctttcgcgtcgtgggccggaagatgcagcccgaccagcaggtgcagcttcccgccggccccctctgtgggctgaacccctacccgccccacccctgcgcccgccgcccctcacccccctttcccctcccaccaggtggtcatcaactgtgccatcgtccggggtgtcaagtataaccaggccacccccaacttccatcagtggcgcgacgctcgccaggtctggggcctcaacttcggcagcaaggaggatgcggcccagtttgccgccggcatggccagtgccctagaggcgttggaaggtcagaaatggcggcgggcaaaggggaccagtgaatgcggctgtgtggcctggggctgccgctttaccctgctgggacttggtttactcgtcggtaaaatagagcgaattcattgttatcatggaaaattatcactagcattttgtgcattccagtgtgacygtgtgcacctatgtgtaaaatgcaccattggcccggcgccgtggctcatgcctgtaatctcagcactttgggaggccgaggcacacggattacctgaggtcaggagtttcaccgtgcccaacatggtgaaattgcgtctctattaaaattcaaaaattagctgggcgtggtggtgcgcgcctgtaatcccagctattcgggatgctgagggacgagaagtgtttgaacccaggagatagaggttgcagtgagccgagatcaggccactgcacttcagcctggcgacagagcaagattccgtctcagaaagaaaacaaacacaaaaaaaatgcacgattactcagggatcagtactccatgaactttacacaggcacactcccgggaaaccacctcccagatcaagacataggtaggtcctgccccagaaacaggatctcgctctgttgcccaggctggtgtgcactggcacaatcatggctctctgcagccttcacctcctgggctcaagtgatcctcttgcctcagcctcctaagtagctgggaatacaggtgtgcaccaccatacttggctctttttttgttttgttttttgagacagagtcttgctctgtcacccaggctggagtgcagtggtgcaacctcagctcactgcaacctccacctcccgggttcgcgtgattctcgtgcctcagcctcctgagtagctgggattacaggcatgtgccaccatgcccaagctatttttttgtattttgtttttatttttatttttttgagacagagtctcactctgttgcccaggctggagtgcagtggcacgatattgcctcactgcaacctccgcctcccgggttcaagcgattctcctgccctagcctcccgagtagctgggactataggcgtgagccaccacacccgggtaattttttgtatctttagtagagacaaggtttcaccgtgttagccaggatggtctctatctcctgaccttgtgatccgcccgcctaggcctcccagagtgctgggattacaggcatgagacaccatgcccggcccttgtattttagtagagaaggggtttcaccatattggccaggctggtttcaaactcctggcctcaagtgatccacctgcctctgcctcccaaagtgctgggattataagtgtgagccaccatgtctggccacctggatcatttcaaattttttttttttttttactttttgtggagatggtctacaggctggtcttgaactcctgggctcaagtgatcctcccacttcagcctcctaaagtgctgggattacaggcatgagccactacacccagcccagttgcttttttttttttttttttggagacggagtctcgctctgtccccaggttggagtgcagtggcgcgatctccgctcgctgcaagctctgcctcccgggtaaatgccattctcctgcctcagcctcccgagtagctgggactacaggcacccgccaccacatccagctaattttttgtatttttagtagagacgggatttcaccgtgttagccaggatggtctcgatctcctgacctcgtgatccgcccgcctcggcctccgaaagtgctgggattacaggcgtgagccactgcgcccggccttttttttttttttttttttttttttttaatatggagtctcactctgtctctcaggctggagtgcagtggtgtgatctcagttcactgcaacctccgcctcctgagtttaagcaattctgcctcagcctcctgagtagatggaactataggtgtgcaccaacatgcctgtctaatttttgtagttttagtagagacggggtttcgcagtgttggccaggctggtctcgaactcctgacctcaggtgatccactcgcctcggcctcccagagtgctgagattacaggcgcgagtcacgcgcccagcccagttgctatttcttaaaccttaacgtgcacatgaatcacctggggatctggttaaagtgcaggctctggtgcaggtgggctgggcggactgagactccacattctcacaagtgccctggtgatacccaggctgctggtctgcggacgtgactgagtagtgaggttttaggtgactgccgtgcatctggcctggaatcactgctgtagaactgaaagtcaccaaatgcaggggtgtttgcttcgtgggacaacttctgtgctagtgcggaaggggcttgctcctctggggcacacagaaaaatacagtgggcttcagttgagtcatctgtaaattggggctaattcattgttaattcgtagccaattcaattcaggtgctagggccagaggcctggaggtaggtgaggaagaagctctttacctttccaggttcttaggtaaggtccaagtggctgtaacagtggttaagagctagccaggggccaggtgcggtggctcacgcctgtaatctcagcactttgggaggctgaggcaagtggatcacttgaggtcaggagttcgagaccagcctagccaacatggtgaaatcccatctctattaaaaatacaaaaattagccaggcatggtggcaggcgcctgtaatcccagctactcaggaggctgaggcaggagaatctcttgaacccgggaggtggaggctgtggtgagccgtgattgcactgctgcactccagcctgggtgacagagtgagactctgtctcgaaacaaaccaacagtggttaagagcctggctgctggaatcagcctgaattcaagtcttgttcctgcacattccaccctggagaaatctggggcaagtgactgttccccgggccttagcttctcctgtcactgggacatcacaacagcacctaccttagggcaactcaggccagggaagttggtgctgcctcacctcccaatgtgcgtcctcctgggcctggagcctcagggcctctggaaggaggaagtgagcgcctctgggcaggattcctgggaggcctgggagagcaagggaagcgccaagagctgagcagagttctgggactgatccatggccctttctctctcacctttcaggaggkgggccccctccacccccagcacttcccacctggtcggtcccgaacggcccctccccggaggaggtggagcakcagaaaaggtggggctgggccctgggtggggaaccttagccgctgccagagttccatatgttctggaacccttgactsctagagttcagaacccagccaacttgcagttttcagaatgttcaagaaacttctgacactcagagttgcagaacctcctggtccctgcagattcctggaaatcagaatatggtggttgaaagaatcttgtggctgggcgtggtggctcacgcctgtaatcccagcactctgggaggccgaggcgggcagatcgcctgaggtcaggagtttgagaccagcctggccaacatggcgaaatcccgtctctactgaagataacaaaaattagccggtcatggtggcgcccgtgcctgtaatcccagctcggcaggccgaggcaggagaatcgcttgaacccgggaggcagaggttgcagtgagccaagatcgagccactgcactccagcctgggtgacagagtctcaaaaaaaaaaaaagaaaagaaagaatcttgggcattttgtaattcggtgttcctgacagtttagtgactgggatctcgcatcctgatctctccctgtcgctgccctgccctccattccccctactctcacccagcccccttcttggttccctaggggaggaaggcttgggtgagtattaggagccagccaccctggagacctctgagagagaggacggaggtcgctggccccttcgctggccatccttaggrccctgattgacsgcagctctctcgcctccccccacaggcagcagcccggcccgtcggagcacatagagcgccgggtctccaatgcaggtgatgctcagatagcttcgggagttgggagggggcctccctggaggaagtggccagccagctggacagtgaagaatgaggcttctctctctcagctgcccccttttctgtgtttgtttcaggaggcccacctgctccccccgctgggggtccacccccaccaccaggacctccccctcctccaggtccccccccacccccaggtttgcccccttcgggggtcccagctgcagcgcacggagcagggggaggaccaccccctgcaccccctctcccggcagcacagggccctggtggtgggggagctggggccccaggcctggccgcagctattgctggagccaaactcaggaaagtcagcaaggtgaggggccgggagaggtgggcagggggcaacagggcttttatgggggatgaggccagggctgccggcggtgtcattgggctggaaggccaaaaggcctgcccctaaagctcctgccccttttaaatttctccagcaggaggaggcctcaggggggcccacagcccccaaagctgagagtggtcgaagcggaggtgggggactcatggaagagatgaacgccatgctggcccggaggtgagcctgagcctggacccccaagtcacctggagttccagttcagtagggcccagtcagaggagggctccaattcctgtttagtttgtttcttttggtgaatgttccccctttgataaccaggtttgggatataatggtggggtttgtcatgaaatgcctgaggcttgcaaccacctaggtagcctgtagatgttctaaaacccagaattctagaaccgtaggagatccttcctcagaattctgggaactcaggttcctgcaatctcagtgttccaacacagcaccgctccaccctcggaatcttactgttccctaatataagaatcatagaacctcctccaccctgattctagaaccacaatctcttgaattttttttttttttttttttttttttttttgagatggagtcttgctctgtcacccaggctggagtgcagtggtatgatctcggtccactgcaacctccgcctcctgggttcaggcagttcttctgcctcagcctcctaagtagccgggattacaggcatgagtcaccacacccggctaatttttgtatttttagtagacacaggatttcaccatgttggccaggctggtcttgaactcttgacctcaagagatccacctgcttcagcctctcaaagtgttggcattacaggccactgcgcccagcacaatctcttgaatttctaaaactagagtttccttaggttttcggagttccagaattctatgcgctaggatctacatttctagaactcccctcagaaggggatgggttgggtgacggaagcacgtgtttttgcttttctctcctgcagaaggaaagccacgcaagttggggagaaaacccccaaggatgaatctgccaatgtaagtcagggactctwcttgccctacatctcttaggccgtaccatgagggtagggatagtgggatgtgtggggtttgaacctgaaagaggaaatgggcagaggtgtggcaggggctggctcatggcagttttatttcctaccagcaggaggagccagaggccagagtcccggcccagagtggtgagtagagtgcccagtccagccacaggaactacaaatcccagaatactctgttctcacatrttaagcacccttataggagagtcagggcgaatggtgctggggattgtagtctcctgagatggggctttgatcaggggctgatgaggttgggggagtaagattgattggggggcagtcttttgtccctgatctttctgatttcttgcctatccccagaatctgtgcggagaccctgggagaagaacagcacaaccttgccaaggtaggccatcggtcctggggcccttggggaggtaaaggcgggcagatcgcttgagcccaggaggtcaagaccagcctgggcaacatggcgacaycccatctctacaaaaattagccaggcgtggtagcacttacctgtggtcccagctactcaggaggctgaggtgggaggattacttgagcccaggaagttgaggcctcagcgagccatcatcatgcctgcactccagcctgagaaatagaatgtgactgtctcaaaacaaaacacaacaaaccaaaaccaaaaaaaaaaaaaactggggccccaaaaatacttggacttgcccaatttataaggcagagctcaatgtgatccctggaataggaggcggggaagcaggtcctctctctaatmtcattgctgtcccaaaccacaccaactcccccaggatgaagtcgtcttcttcggtgaccacttccgagacccaaccctgcacgcccagctccagtgattactcggacctacagagggtgaaacaggtaacttgggggggaagttggggaccacagcaagagagatctaggtctggcccctgccactggcatgccgtatgatcctagataacatctcagaaacctcaggtttccaatctgacaaatggagaaactggattgggtcaaggatgaccgagactccacacccccttttctggcacctgtgacagacattattaatctatcaccgcgctcattccagatgagtgccttgaattctttccgcacattgacccagctgtccatcaccaattggagttggcaggaggctggaatgcgcttgccaaccttggtactggatgttctccagtacttttccggctccaaggatccagaattctcccctagaatcctccagtcactctgcgaccttgacagcgatgtcatggtgtcgatgtaggggtaggtctcaaacctactccccctggcttttccatcaacaagaaagaggggactctggcagggcacggtggctcatgtgtgtaatttcagcacattgcgaggctgaggtgggagcattgcttgaggccaggagtttgagaccagcctggggcaacatcgggagacccccatctctaaaaataacttttaaaagttacctgagaaggccaggtgcggtggctcatgcctgtaatcccagcactttgggaggccgaggtgggtggatcacctgaggtcaggggttcaagaccagcctggccaacatggtgaaacccatcgctactaaaaatacaaaaattaggctgggaatggtggctcacagccataatcccagcagtttggaaggctgatggggacggatcacgtgaagtcaaaagttcgagaccagcctggccaacatggcgaaaccctgtctctactaaaaatacaaaaattagctgggccttgtggggggcacctgtaatccagttatttgggcggctgaggcaggagaatcgcttgaacccgggagccagagattgcagtcagccgagattgggccactgcactgcagtctgggtgacagggagactctgtttcaaaaaaaaaaagaaaaagaaaaagttacctgattgtggcggcaggtgactgtggtcccagctacttgggaggctaaggcaggaggattacctgagcctgggaagttgaggctgcaatgagctgtgatcatgccattgcaccctagcctgggcaacagagcaaggttccttctcaaaaaataaaagaagggggattcattcctgcaagtcccggtacccsctcctgattagttttaccccattaattttaggagcttctggaagaggtgaagaaggaattgcagaaagtgaaagaggaaatcattgaaggtgaggtggtttgctttggttttgttcttaaacatttacttattttggaggcatcatgtccctgggcaagagccctgttttggaagggaggaggcagagactctgcccctgacctctgctccttgtttccttccagccttcgtccaggagctgaggaagcggggttctccctgaccacagggacccagaagacccgcttctcctttccgcacacccggcctgtcaccctgctttccctgcctctacttgacttggaattggctgaagactacacaggaatgcatcgttcccactccccatcccacttggaaaactccaagggggtgtggcttccctgctcacacccacactggctgctgattggctggggaggcccccgcccttttctccctttggtccttcccctctgccatccccttggggccggtccctctgctggggatgcaccaatgaaccccacaggaagggggaaggaaggagggaatttcacattcccttgttctagattcactttaacgcttaatgccttcaaagttttggtttttttaagaaaaaaaaatatatatatatttgggttttgggggaaaagggaaatttttttttytctttggttttgataaaatgggatgtgggagtttttaaatgctatagccctgggcttgccccatttggggcagctatttaaggggaggggatgtctcaccgggctgggggtgagayatccccccaccccagggactccccttccctctggctccttccccttttctatgaggaaataagatgctgtaactttttggaacctcagttttttgattttttatttgggtaggttttggggtccaggccattttttttaccccttggaggaaataagatgagggagaaaggaraaggggaggaaacttctcccctcccmccttcacctttagcttcttgaaaatgggcccctgcagaataaatctgccagtttttataaatgctaagatctctggagtgatttgaaggcctgttctgatggggatggaggtgtgctcggcccccggtgcccctccaggaagatttggtcctctgctgagaacccctgcctcctcccaggaatccaccttcccttcatcttccttcccaccctgcatattgcgcctgctcactcatcctcaggcccgcagccaggatgatctctgccccctccagcctccctccccatgccccttaggaggccacttcctccccatcccaccctgcccttcaccaccctaggggaggccagaagcagcctcactttgtgtagccttgggcaagtccatttgcttacctcaggcctcagtttctgatttgggaaagggctcataagatgattctctgcccccactctaccactctcccagcttctttcctctttttttttttttttttttttaatgagttggggtcttgctctttcacccagtctggagtgtagtggcaggatcacagctcactgcagccttgaactcctgggctcaagggatcctcctgcctcagcctcccaagtagctggaactacaggcgtttggtatgacgcctagctaatattttcatttttcgtagagatgcggtcttgctgtgttgcctaggttggtctctaactcctggcctccagcagtcctcctgctttggcctcttaaagtgctggaattacaggcgtgagccactgtgtccggccttctttcctaatttcaatgacattttgcagacgcacattatggttctcagacacgttcttaagatctttaccccagagctcctttaattagaaaacgctgacagtcgatttataaagtagcattcagagtcacagagctcatccacgcccccttcagttgtcgggtgggtaggtcatatggcctggtggaataccccgcttggacagggggacctctgggctgagggacaggtagtccccctggaggaggcctttgcgtgaaggagggcggaggaggacctggaccagtccaaaggcaggaaggaagggcgatccctgcgtaccgtgaggggcagatttggagggaagttgggcgaactgacgatgacttaggtagtaaagggacaggccggtccctagcaaaggcaactgaagaggacagcgagggaggaccggataaaaggacagtagcagtaggtccaggactggggactggtgaccaagtgactgagcctgaaagccagaatggactagccctggtcaagaccggtttttcctcccaaaaggccacgtcctgctggaacagaccacagaatgccgggctgggaggcgtttccctggaagacccagcatagccatgccagtggggtgcgccataggcggaagaagaggggggttatgttggatcgatccactcagggaggggaggatgtcaatgacaggtactaagatggattaaggtcaggagccgcagggtggtgactcattggagctaacgcagtccaggattcacccccacctttccccctaagactgaggtagatggaagggggcgggtcgggaagtccgtaggaactttgtgcatctttacaatggtctgtaccaatgaggaggaggtaggtggtgttcggtgcaaaggatgagcgtcctaggggaagggtccactcaggtgagtgagggtgcgggtgacagaatgagaggtggctaaatccgggtgcagaattttgttttgccaaaagaggtggacgtcctgctggcctacctagcggtagggaggtggggtctgataaaagacgctgtctttccaaagtgctcaacaaatgcgctggcaggggcggggtgggatagggcggggtccttcttggaacgttccacctgcaggaggcggagagtcccagtggaaggtaccactgggcaggttagtagggaggttcgatcagctccagcccaggatctctccggcgcccccgaaggactgggtggtgtcagctgggccggtccaggatgggacagtgcggagaataggccaagacagagacttcgcagtccagacagcagtcacctccaagaccagggccccgagacctcctatttctcggacgccggcgcaactgggggtgcaggcggcgggtctcggaggcagaggtgggctcgcacctcctgcagctgagcgcgcagctcctccagggcgagctgcgtcgacgtcgcctgcacctgcgcctgcaactcctcgagcgccagccccaagtggcccacctcgccccgcagcgcctccctggcaacacgtcgctccttttccttgcggcgctgctgcaactggtggcgccaatactccagcatcaggcagctgcaggcggtgatgaagatgatgccctcgcccagcagctccgcgcccagctcggcggctgcaccctcgttcagcggcttgatggcagcggcattgaaacccatgatgcgcattttggtccgcatctccagccagtggtacactgcaggaaaagacaggagtcaggggtcttttgcagggcagcctcctataagccccgaccctctgtgcttcgatgtccccgttgtagcaatggggatgtggtcaccacaatcggacgcgtgctggcggggacgccttaacgaagacaagtgcaggcctcacacccagaatcctctagggaaaacttccttaactaatgacttactcatgtgaaggtggagtgtcagcttttgcatcgttataaacacagaagatgctgatgctctttttttttctttaatttttctttttttgagccagggtttcgctctatcgtccaggctggagtgcagtgccgaaatcacggcttactgcagcctcgaactcctgggctcaagcgatcctcctcccgcctcagcctccagagtagctgggacaacgtgtgcgcgccatcatgcctggctaattttttaattttttgtagaaatgggggctccttgcgttgcccaggctggtctcgaactcctgggctcaagcgaccctcctgccaaagcctcccaaagtgctgggactgcaggtgtgagccacggagcgcggccctgaggctaactcttaattccatcaataattcatacttcgctgggcgcggtggctcatgcctgtaatcccagcactttgagaggccgaggtgggtggctcagttgagatcaggagtttgagaccagcctggccaagacggtgaaaccccgtctctactaaaaatacaaaaattagccgggcgtgatagcgcgtgcctctaataccagctactctggaagttgaagcaggagaatcgcttgaaacagggaggcagaggctgcagtgagccgagatcatgccactgtactccagcctgggagacagagcgagactccatctcaaaaaaaaaataaaattgtaacttgatttttcactgcactccccctcaaccccatgaactatatggaattcatcacatattctatctccttccctctcccctcccaatttttacaagtggtttttatttttttactgtttatttttatttatgtatgtatggtttttttttattgagacggggtcttgctctgttgcccaggctgtagtgcagtgacactatctcagctcactgcaacctccacctcccaggttcaagtgatttccaactaatttttgtatttttactagagacgggttttcaccatcttggccaggctggtctcaaactcctgacctcaagtgatccgcctgcttcagcctcccaaagtgctaggattacaagcatgagccaccatgcccagcctttatttatttatttattttcgagacagagtctcggtctgtcccccaggctggagtgcagtggtgtgatcttggctcgctgcagcctctgcctcccagattcaagccattctggtggcttagcctcccaagtagcttggttcaatggcgtgtgccaccatgtcacctactttttttttttttttttttttttttttttttttttgcattttagtagagacagggtttcactacgttggtcaggctggtctcgaactcctggcctcaagtgatccacccgcctcagcctcccaaagtgctgggattacaggcatgagctaccacacccagcctatttttttttactgtttattggtaacctatgtaattgctttgtgcaatgctttgtgctgcctgaaattgaaaatatagaccatgtaaaatatggaggttatggaaatattaatcctgtagatccataatgaagatgtatttttatttcactaaaccagtggcatgtgaagcattatcattaaatgccagctggactcactgcttcgtattgtgccacattttcattttcttttatttcaactttgacgttactgtatgaaggttttagtttttcctagaatgatgattctcaaactaactatgtgacccacaaaaatttaccatgggaccaagatcatccagatgtttgctcctattctgtttattaaataaacagttgtggacacactagctgttctctgggctgctgcaggactgtcctccttcatactgctcctcctcttttgaggaacttgcatcctctttgttgaatttcattctagttttcctggagtatatccctagataccttttgcagaaagggtgcttggtatctcagtgttttgaatccttgaatatctgaaatatctttttccaccttcacattagatgagatgataaattctagccccagaatgactagttcgaaatcctattcctcagcagtttggtggcctggttccacgatgtgtaaaggcagaggggcttgttgtcatccctgtggcactgacattgcaccaagatgaatgtttttcttattccccttaaactcttctatcttctatccaaatcccgtttctctctttagcccttcgaatttttcttgtctgctcagtaaaggattaacttcatccaaatagaggtctgacctttgccttttactcctgggaggtaattttttagttcttggaatgtccagcctgagtttacatggggccttgggccacaccatatggtttgtgctaacagtggtgatttatggtgggggctttgggccatgtgatatcagcttaacctctggaggggctagaatctaaggggagccacacaagtggtcagccttatccacatgctgatccctattaaaaaccctggacaccaaggctcaggtaggcttccctggtgggtgacatcatgtcacttatcattgctgggagaagttagtgctgtccacaactgtaccaggtattaaattggcacttggaactctcctggacccatggacctcttccctgggctgcttttaatctgattcttttcactgtaatgagccacaaccatgagaataactgatcctagtgagttctgtgagtctttctagcaaattactgaaactgatggtgatcttagagactcctgagcttgcagtcaatgacagaagtgagggtggtcttggtgaccccctaaatgtgtgtcttatctgttgcctcctctccattttctcctacccttctcctaccccttcccagtctggaacgccaccctgcactgatctcctcactttcccttcctgtttttttccattgctcctttttgttacaccactgggaggttttgttgactttcagaacttattttttccccctaattttcagtctttatttaaaatttgattataaaatatccaaacatacagggaagtttagtgtccattcggctttaaaattattttattttattttattttttaatagagatggggtctcactatgttgtccagccttgtctcaaactcccagcctcaagcaatcctcccacctcagcctcgtaaagtgctgattgcaggcatgagccactgtgcccagccctaggatgatttttattttttaaattttttttgagatggagttttgctcttctcccccaggctggagtgcgatgacaccatctcggctcactgcaacctctgcctcccaggctc

SEQ ID NO: 97633 - DNA, 17141 bp, Homo sapiens
gtgatccacccgcctcggcctcccaaagtgttgggattacaggtgtgagccactgcgtccgaccgtttttgtttttatagagatggggttttaccgtcttgcccaggctgatctcgaactcctgggctcctacctcagcctctcaaagtgttgggattacaggtgtgagccaccacatccagccaagccttaccgttccttttttttgttttgttttgttttgtttttttgggacggagtttccctcttgttgctcaggctggagtgcaatggcaccatcttggctcacggcaacctccgtctcccgggttccagtgattctcctgcttcagcctccccagtagctgggattacaggcatgtgccaccacacccagctaatttgtatttttagtagagacgggggcctgtccatgttggtcaggctggtcttgaactcctgacctcaggtgatccgcccgcctcagcctcccaaagtgctggtattacaggtgtgagccactgtgcccagccaccatttttctgttatttttttatttttttgagatggagtcttgctctgtcacccaggctggagtgcagtgctgtgatctcactgcaacctctgcctcccaggttcaagcaattctcctgcctcagcctcccgagtagctgggactacaggtgcatgccaccacgcccggctaattttttgtattttagtagagatggaatttcactgtgttgtccaggctggtctcaaactcctgagctcaggctatccatccacctcagcctcccaaagtgctaggtcacaggcatgagccactgcactcggcctggccaccattcttaaagtaataaaaccaattcccttagtttattctgtgatcctcacaactgccctgtgaggtggggaagggagttgtttccctcctactcaactgggagaaagctgaggctcagggagagaggtcaccccattcatgagcagcagaaccaggtctcacaccagggcttctggcctcagagagcttcttgctggcggcaggtgtgacagcactggagtggtacatcaagaccctggcagggtgtggtggttcacgcctgtaatcccagcactttgggaggccaaggcaggtggatcacttgaggtcaggagttcaagaccagcctgaccaacatggtgaaaccccgtctctactaaaaatacaaaaagttagccagcgtggtggtgggcacctataatcccagctattcaggaggctgaggcaggagaatcgcttgaacctgggaggcaaaggttgcagtgagctgagatcgcgccattgcactccaacctgggcaacaagagcgaaactctgtcggaaaaaaataaaaaagaattaaaaaaattagctaggtgtggtggcgggctacagcctgtaatcccggctactcgggaggctgaggcaggagaatcacttgaaactggtaggcggaggttttggggagctgagtgccactacacttcagcctgggtgacagagtgagacttcatctcaaaaaaaaaaaaaaaaagacccagattcttacgtgcaggttgatctgttgaccctgagtgagtggctttacctctctgagccccactttcctggaagtgagataaaaaagggactttggcaatatgttcttctggataccatggtaatgtagtcttgccaattatgaagggtgtggcctcccccaaaaagttggagcagagatggccacccagtgactggaagactcctttttttttttttttgagatggagtctcactctgttgcccaagctggagtgcagtggcatgatcttgactcactgcaacctctgccttccaggttcaagcaattttcctgcctcagcttcctgagtagctgggattataggtgtgcaccaccacgcccggctaatttttttttttttttgagacagagtctcgctctgttgcccaggctggagtgcaatggcgtgttctcagctcactgcaaccgccgcctcccggggttagagtgattctcctgcctcagcctcctgagtagctgggattacaggcgtgcgccacaatgcccggctaatttttgtattttttagtggagacggggtttcaccacgttggtcaggctgtctcgaacttctgacctcgtgatccgcctgccttggcctcccaaagtgctgggattacaggcgtgagtcaccgccctggccacacctggctaatttttgtatttgtagtagagatggggtttcactgtgttgtccaggctggtctcaaactcttgacctcaggtgatccacccgcctcggcctcccaaagtgctaggattataggcgtgagccaccgcgcctggcctggagactcctttgtgttccccagtctccaccaaccagtaaatacatagtggtgatgtcgccgtggagcccgtgcacagtactcccctgggggctgcactcagtgctggtgctggggcatataacctactctctggagagccctgcgggatggtctatgagcttttctgccagcaggacctgcaaacgcgcaggtgcagcccctccttcaccctgcgatctgagagatgccatcaagcaccgtgcctctatccttatccaaagctgaggcctctggacttaaatttcaggcccccatttcagacccaacctctggaccttgaattttatccaccactctccttaccctcccagtggggggatggctttgatgatgcatccttgtttccttcttccctcccatccctatctcttcctcttccctctccccactcctctcttacacctatttttcaaaaattaaagaaaatgttttttaaactgaagcccaagaagcattgatccttcatgtatttttgcctcctcttcccccatccttccccatgcctcccaccctcctctatgtctctcactttccggtttttcctcacccctctcccaactctcctcaactgttcttttcccttgattctggatcccttctttcttcctcaccttcctcatatcccctcaccctcctcatatcccctcaccctttcctgtgcttagatgcaggctacaagctgctgtgcatggcactgggtctggctgatgcctacatgctctcagaaggctgcaggtttgcttgagacatctgtggcccccatgctgtgtcgctgggcctaggtggaggcgtggtgaagctggagggaaagctggctttgcttggtgtggagggacaagggtccccgcctcagcacacctaccaccaactggtgccaggcaaccaagaggcagcagcctgggccagccaggacggcttggtggcatatctggatgtcaggcacttggaacaggtgctgggggatctgaaggatgtgaagggccaggtctgagatcagccacttcccactaagaggcccctctatcctgcaccccagcaaacacatggagctctgtgtcaactttccaggctgtagaagtgggccattctttgtgtgtatgtgtgtagtaaaatatatataacataaaattcagggacattgagtacatacacattgtgcaaccatcagcaccatccatctccacaacattttcatctttctttctttttctttgagacagagtctcgctctgttgcccaggctggagtgcaatggcacaatatcggctctactaaaaatacaaaattatccaggcatggtggcgcatgcctgtaatcccggctactcaggaggctgaggcaggagaatctcttgaacctgggaggcagaggttgtggtgagttgtgccactgcactccagcctgggcaacaagagcaaaactccatctcaaaaacaaaaacaaaaacaaaaaacctagatgtttatggttaaggaaacaaattaataataataaaaaagataatatcgattcttacaaaatacagtaattaagaaaattaatcctttatcacaaacttttgtagcagagcacatctctccatatatacaagcattataccgagggtgaatgtgttcctcctcttactttttttttttgagacagagttttgccgggcacagtggctcacgcctgtaatcccagcactttggaaggctgagggggcggatcacgaggtcaatagatggagaccatcctggccaatatggtgaaaccccatctctactaaaaacacaaaaattagctgggcgtagtggtgcgtgcctgtagtcccagctacttgggaggctgaggcaggagaatcacttgaacacgggaggcggaggttgcagtgagccaagatggcaccactgcactccaccctggtgacagagcgagactccgtctcaaaaaaaaaaaaaaaaaaaagagagacggagtttcactcttgttgcccaggatggcatgcagcaacacgatctctgctcactgcaacctctgcctcctgggttcaagtgattctcctgcctcagcctcctgagtagctgggactacaggcacacatcattgtgcccagctactttttgtatttttagtagagacggggtttcaccgtgttggccaggctggtctcgaactcctgacctcaggtgatccacctgcctaggcctcccaaaatgctgggattacaggtgtggtgagccactgcgcctagcccctcctcttactttggggaacatcctactctgtctatggagcagctgttgtttcaccactttactttcttaataaacttgcttatactttgcactgcgactcgccctgaatctttcttgcatgagatccaagaaccctctcttgtggtctggattgggacccctttcctgtaacaaatgcattggctgataggagaataaagaaaaaaaaagaggaaaaactagagtaacttctctacataatcatattatatgaccgttttgttaaccatgataacagttaacaaaataattttcttatgtctaattctcagtccatgtctgtatgtcccaaaatgtctttcacagctggtttgttcaaccattcaatgaaggaccaaacattgcagttggttgttatgtatctagtctctcaatcttgatcttcagaccaccttcagcccatctcaccacatccgtcccaagccctttgagccagccaaccccaacctgccatgtactttacaaaatgctccttttttttccacagtcgactgcttctctgtccctggagctctcccctttattctccaaggtcaccttgagcacatccttctgctccgtgaaatccattctcctctccctttccctccctctgagcttaaccagctgccaccgcaggcttctgcctttcttcacagtgtggccagaactcggttctgcctgctagcagagggcagggccgctgtcttcctctccttgcagcccccaagcctagcacatgcctggcatctagtggcagcacaataaggaacctgatgaatactcctttcttctgctctccgctcctcctccacagcctgccagccatggtcaggaagagcaagatccggaatgggcttggtgtgtcccgcgggaaggccgtgatcctggaagatgcttctcagcccagcccggatctccttcctttagctctagagacttctttcattctttgtgtacacacatacactaagactcaggaagtggttcttgaggcaggaccttaagagcccaaggagtggggccgaggctggaggtgtgggggtgtgacggccggtcctactctccggcctgttcagatcagctccttctggggaccacccctggcacacaagggagggaggcagcttgatccccctagcccgcttccagccctcacctggctttgtcttctgggataagacggggaaatccagaggatgtaagcctctcctgccttcgtgtcttcccccaagccctcgctatcacagacggatgcaggagctgtctgggaggctggaagcacagaccttgtcaatcctcccccagagggcgggacccgacgcggacgtgtcttgattgactgggtagcgtggcttcggggaagggcttcctccccttttctcagactaggatccctggaaaatggagaagctgtgctaatagaggggggccagaaatccccactctagaatgctgtagaatgttgggagacaccyaggatgtgagccagggactttctggaagtgtttgttctggccccacccgaccccaggcagtccccagctgtctgcacagtcggatggggagggggcttgcacagagttggagccagaggagagagctggctcatcccctacggtaggatggggaaacctcacagaccacattgtcacccggcctcagctctcygccccggcgctcagagggtaactctcayccacctcgtccgcttctctgaaccagagtgacccaggctgcgctccgccccgctctcctaccccgagttggcacggaggtatagcgccagaggggggccccaggcgccccgaggtcttgcccttgcggctttccctttgcgggggtgggcgccttcttccgggtaggggccacgtggccctggccgggcggggggctcggcccaccccgcgccgggcccagtgactcaggccgcagctgttaccgcgtcacatgagggaggccggcggccactcggcgggggaggggaccgtggctggagcccggggcggggccgcgcggcaggcggggcgggagccggggggcgcagctagagagccccggagccgcggcgggagaggaacgcgcagccagccttgggaagcccaggtgaggccgcggggacccggcggacttcggcgcgggctgggagagaccacccgcagtcccttcctccagggctcgccccaggcccgcggagactcgtccggcgctctccagccgccctggagcaactttgcttcgaagttccctgggcccgggcagggtgtggcgggggtgctggctgcactttttttttttttggtgggcggggaggtcagagcccaggggaaaggggctggggcgggggtcggggttgggctgaagaccgtttctccaggctgggtgttgggtggggaaagggtgtttgacgcccggagactggcgggccgagggtcggcgtcaggctcaagcccctgccggcgcccttggatctgtcctgggccccagaggcggcggggcggggtccgggcttcgcggccgtcgcccccacccctctcctgcgggtaaagagggggctgggagacgtggatccgaccgcgggtttccgggtgggaggggccgggaatcggggccgtgaagggaagccctcgagggccggccgggagcccggaaaccgaggtcccccttcggccagttttaatccccccgccctcccctctgccccaggcccggcagccatggcggtggaaggaggaatgaaatgtgtgaagttcttgctstacgtcctcctgctggccttttgcgtgagtggcgaggggtcctggggggcgcgccggcagggtgcggggagacctggctccacagtggtgagggctgagggaatgagaattaaggcagctggagaccagatgtggaaagaaagccagggaaagacagcgcagccactccctcctccagttttcctggacacctgaggcttgtttccaccgagaatggccatcctgggtgtgcagcaacccctacccccatccctcctggcccttcctgtctggtgacccaaccacttgtgatatggggcagtggggcaaccagccaaccgcctgatgctatcgccatggggcttcccttcgctctcccttctcccctctctccctccccaaccctctcatccctgtccagcccctctccccctttccctcctcccagcgcttgggggtgaggaagggctctgcccacttcaatttgctcctgccctgggctcctggcttgagaggctactgtttgtctagggagggacacatcactcttgctcccttttcctcttcccttctcctggcctaactggccagaggaaccttagtcacagctgatgcgcgcgtgggatgtgcactggaggatagtgagggggcagttstgggagagaattgagctgggagccctggaggcctgtagaaagcattattctaggtcagaaatacgtgtcttgaggtcaaggctttctgggaggtttttgaatttggtcatgtccctgattaaagagccgggaggggatcaggggaggtaggggcaggcaaggatgggtcatccccctaccccacagccaaagaaattccctagaggtgtgagaatctctcttccggatggggtcaagtctgtgtcctaggtgtaycccctgccctccaccatggagggccactgtgttgtggatatggcctaatcctcacctgattttctcttaggcctgtgcagtgggactgattgccgtgggtgtcggggcacagcttgtcctgagtcagaccataatccagggggctacccctggctctctgttgccagtggtcatcatcgcagtgggtgtcttcctcttcctggtggcttttgtgggctgctgcggggcctgcaaggagaactattgtcttatgatcacggtgagttgggggcgggaccaacatgggcggtctgggactgccagagcagcttggttcgggctcaggaaggtgggtgaggtgggtgggtgaggaagacctttgtgagtgtccagggaccggctgtgccaaaacgggcccctgtaatgcatagactccaaacttgactyctgtcctttgctcctgcagtttgccatctttctgtctcttatcatgttggtggaggtggccgcagccattgctggctatgtgtttagagataaggtaagcagggaataatgggaagggcctgcctcagccgggtctgggaccctggtgcttgaattctgactgcaacagtgctcctccrtactctcaggtgatgtcagagtttaataacaacttccggcagcagatggagaattacccgaaaaayaaccacactgcttcgatcctggacaggatgcaggcagatgtgagtggsgttgctgggagcaggggtggtgggaatagagaattctcatctccaaggctgggtgtggtgrctcacgcctgtaatctcagcacttttgaaggccgaggtgggcagatcacctgaggtcagaagttcaagactagcctgsccaacgtggtgaaaccctgtctctactaaaaatacaaaaattagccaggtgtggtggtgagtgcctgtaatcccacctactcaggagggtgaggcaggagaatcgcttgaacccgggaggcggaggttgcagtgagcygagattgagccaccgctgggcacttgtctgggcaacagagcaagtctctgtctcaaaaaaaaaaaaaaaaaaaaaaaaagaattctcatctccatattgaargtgaaggttcacttaacaaccttcttctccatatttcttccctcccccagtttaagtgctgtggggctgctaactacacagattgggagaaaatcccttccatgtcgaagaaccgagtccccgactcctgctgcattaatgttactgtgggctgtgggattaatttcaacgagaaggcgatccataaggaggtagggaggagactgtgtatgggacttgggaaacctgggaaatgttttagaatgcaagagacccaggatggaggtggacagggtcagggatggggaggggatctggaaatgctaagggtggggtgaaaggtacaggggcagggaagagactgatggaccaagggagggggttggggtgggaagtttctgatggtgcttttgtcctttgtgcctgccaccttcagggctgtgtggagaagattgggggctggctgaggaaaaatgtgctggtggtagctgcagcagcccttggaattgcttttgtcgaggtaagagataaccctgagcaggggctgggactctgtccagggtgcctggagggaaggggctgaggggaggagggtgctgaacaggaggtactggcctgggagtgtgtgtttggagtctcttgcatgggtctgaggtagctagcccttctgactcctctccacccctgtccccatctttccttctaggttttgggaattgtctttgcctgctgcctcgtgaagagtatcaraagtggctacgaggtgatgtaggggtctggtctcctcagcctcctcatctgggggagtggaatagtatcctccaggtttttcaattaaacggattattttttcagaccgaaaagagatggtcygagtttgtcttagagtgatgcttgattccttcctttccttactgatgttccctgtcctctgggaccttaatgcatgtgtacttcgaggtctattttggggggtgtttgggaaaggaggactttgcgaaggtgttggttgggcaggcagtgggagaagtgaggatccagagactgtggtgctttctgccccctagtcttatgctgccaggctcactatgaacattcatgaagccatctgctgcataagtcaaagcagctccccagaaaggtcccacctgmgagagcccagcccccatctgccttggacatcttcctggccttctgtgcaccgctaagggcccagcacctcccttcctggccaatcctcaagggatccagctcctttcgaagtatgataagttgccttgacayctgtgtggtcagtgtccttagcaggagaatttatgtgaatattgccttttcttccatggaagccacccagcctggcccagaaccctcatcacctgctcttctcccccaagaaatatgaagaccattcccagtacagacactgaattgcaaccttactccccttcagaaaataagggaaatgtattaaagtgccctttgatggccactccccgacgtgcagctgtagatgtgaggcagttccctggcgccccactgtgggtgctagctgttttgcagggactgaacaggccagagaccgtgagcatgtcggtttggagtagttggcacttaaatggggtcagccttccactgggcacatttctgcccaccttctttttattttttaaacaatacacttttgttagtgcttattttgtggcaggcaccaggcagtaccagggtgggggcagaaataaatcaaagtccttgtccttgaaaaacaatctcttgctggaaggctggattcagtagactgcttgggcaggcttgggaaggacccaggtgagcacagcatccaccaggctggctggcaggtaggaggcaggcagccagagcagcttggcatcccaacctgggctgtagcgggttcgggggtgtcgagcagtcagggcatgctccaggcatcggctcaccttggttaggtccgggtcacagatcaggttcatgatgcgctgttgcattttcaggtctgcagccccataggtggttgcaatcagtttcccttcctcactccagcccatcttaggtactgtcttctggggccctgggcttgtcaccctcagtcccctcctcagtgtggggagtgggcaggttccacatggcctgggcactcttgtaacatcctgttcaccctcaaccctgccctgggtgccccacccacctcctagcaggcttatgcaggactggcctttctggtacttgtttcccttcatgtgcccctgtgtgggcctggctactcacacttggtgaggaaggcccccccatagtgggcctgtgtggcaggaggcagccgtgcccagcaggcctgcagggttttctccagactctccaggttggtcacaggggttcggaagaagccaggctccacgatggagactcgtatcccaaaatgagctacatcccgcctagagtcggggcagagcgaagttgctgggttcttgccctatagggaggggactttgagggacatgggttggggagctgagaaagttaccacagaccagggacaagagttttgacggagatgcctactgccccgggacaagggtcaagtggggtagagggaggaaagtatttttgaggtttgttttctttgatctagagcaggggtcagcacgtttttttcttaaagggccagagagttaatattttaagcatggcaggccaagaaacaaaattaatgatattatcaggtacttatataacagtttacaatgtaaccatttaaaaataaaaaaaaccattatcagcttgtaggcagctggccagatctggcttgagtactgagtttgccgattcctgacctagaggaaccccattcccttgctcccaaaacacatggttgagccctgagtgctggatattgaagggtatagtctcgtatttgctggagggtaagctgatggggaaagtggggatacatcccactgccctggcacagatgtagaaatccaagtataggtaaggagcaggagggaaggggataaaaaaaaattcaagtataaagtatgtgttccagtatgcagtggctcacacctataatcccaacactttgggaggcccaggcggaagcatcgcttgaggccgggagttggagacaagtctggtcaccacagcaagaccccatctgtaaaaaaatactagccaggcatgctggcacgcgcctgtggtctcagctactcaggaggctgaggcggatatcgcttgagctgcttgagcctaggagtttgaagttcagtgggccgtgactgcaccactgcactccaccctgggtgagagcaaggccttgtctcaaaactaaaagtatgtgtcccatgatgctgcctgaaaaattaaggctgagagacaggagacattcaggttatttgctgagtgatggtgacaaacgcaggcttccttagaaggtagactaagcttaggcgccttatactcctgctaagaactcaggccttgggccgtgtgtggtggctcatgcctgtaatcccagcactttgggaggccgggtcgggtggatcacctgaggtcaggagttcaaaaccagcctggccaacatggtataactccatctctactaaaaatacaaaaaaattagctgggagtggtggcacgtgcctgtaagcccagctaatcgggaggctgaggcaggagaatcacatgaacctgagaggcaggggttgcagtgagctgagatctcgccattgcactccagcctaggcaacaagagcaaaacgcttaaaaaaaaaaaaacaaaaaaaaactcaggccctactcccgttgtcctcatcatgtctcctttgtgctcccacggaactttgaaccttattgtttaaagacgagaggcaaggccgggcgtggtggctcacacctgtaatcccagcactttgggaggctgaggtgggcggatcacgaggtcaggagtttgagaccaacctggccaacatagtgaaaccctgtctctactaaaaatacaaaaattagccaggcatggtggcgcatgcctgtagtcccagctactcgggaggctgaggcaggagaatcgcttgaaccccgggggtggaaattgtggtgagccaagatcgcgccactgcactccagcctggcgacagagcaagactccatctcaaaaaacaaaaaacaaacacgttaaaaatgggtaaagagaagtaatctacttatggtcacaaagcttacataagggtagacttcattgaacccatgaagtctagccctaaactgtctcttcttaactattccaatgtgctgtatcttaaccacctctgctggcccacgtttgttgagtgggctgctgttagtcctggaacccagagccctgtacccctcacctcaggctgtcagagaaggcctccaggccaaatttggagacacagtagcccccaccattggctgccaggcgacccaggacgctggtgatgttgatcacccggccccgggcttgctgcagcagaggcagcagggcaagggtgaccccgatgggacccattgtgttcacattcagcacccgctggaaatcgtcccgggtcagccatggtgtgggtccgatgataccagccacaccagcattattcaccagaccaaaaagccctgtggggagatgaaaaggatgctgggggtaggtgaggcactcccacagctccctcttcttcctgggagcatctgaaaactgcttctcctcaaattgtccctttagcttaccacagcccttgcaggtgactcctggggtgactgtggggatcaggacaccccacaccatattcctggtggtctaccatacttacctgcttccttaacgtgcatctccacccacttggctgcctgctggacgctctggggatcagtgatatccaacagggtggtgtggaggcgggaggaggccacccgctgcaggtcctcggccccggagggggtcaggcagctggccaggactcggaagcctctctggtccagctgcagtgccagaaggcgcccaaagcctgagtcacagccggtgatgaagacaaaggcattgctggcgggcaggctctgccggtccctgagcaaccacagcactgcccagagtaaggcacccagcagaagaggcagccacatagctggagcccaagtgacctacaggtggcagcctaggctgggcagaaaaacttgtccagtttactgtggccctcaagccctttcccctaataccctccctagctggaagcatctggtgtgagcatattgagaaattatctggttggcagataattggccaaccatggctcatctgttcaaagcaaagatgtgggcagacgctgtatttgtggctaacttaactaaaaccacatgagccagatcctgtgtacagacctgctgtatggagcagaggcatctttttttttttttttttttttttgagatggagtctcactctgtcgcccagggctggagtgcagcagaggcatcttcttgcttgcctcacaccacctctccttctaaaccagggacactgaaccttctatatgcaacctgggtcttgtgtttggaatgatgtatagggccaagaggtttgctgtgtgatactgagcatctcactgtctctctcaacctattttctcatctaccaagtggggctaagacccaccaggtccacctcagagttgtggaggatcaaaggggataatgtgtgaggaagcatgttaaaagctgaaagttttgagttggcaatacatgtaatatctggctagtcttctcagttcccccagctcccagtatccacttacctcctgtggcgaaagctggcaggtactacagcgcccgaagcttattcttttgcttttgtttaagagactgctcccagtcttcccagcctcccacactaactactgctaaggccaaagtccggagtgggtggacttggatgccaggcgtattaagtgtatgtgtgacagggtggggataggactgaggaggaggaggagccagggaggctggagcttgcctggctgaagccaggacttggcagaggccagatttgcctaggctccccccaccccttggctgtctttctcagcctgggttcctgaccatctatgtcatggtctccaaggaggagggagctgtcaaggatggcagctgcactgctctgttggtaacggttactggacctgtcattcctcccccttctcagccctgaagtgcccccaggaattaatctcccacctggctcagactcatgacactgcttagagttagcctgggagaggccatgagcacgtggagaggcagaaagccagagctggggaccaggcctgtaccttgccttgtttctcttctgtaggaaacaagtcctgaattaggaagcttggggcagggctactaggaccttctctcaggagggatgggaactcccaccctctgcttgcctaacagacacctgcacaagggccatggaggagaagagagttgggatagtaagaggaagctagttccaccctctccccaaaaggtacctgtccctcagggaaaccacctttgaaccttccactcccacccccgacactggagctagtagctctctgaaacacaccacagagaaacggaggcttgtgttttattcaaggcttgtcagcctccctccttccccctgcgggtgaggtaggagggatagggttgggggagggaacaggggctaggaaggggcagactgcagctgccctttgtagacatattccagtgcagtggcaatggtgcgcatgtccagctcgatgctccgagcccagttctccacatccccaatttcctgggaagggggagaggaggtgggagcccaggaatcagaatgggtagagtatggcttccagtctggggaatacgttttattcatctcctggaaaaggctttacttggacccaccaactgcttttctttctttctctaccttttctgacactggggctatagatggggtttctgggaccaccctacttcctccttaacctaaacctgaggtaacctgactggaggcagccaatgggggcccaggattggggtggtgaggtagggagtatggcccaccttgagtgcctggttgaagttctccaccattccgatccactggcctgtctgcttggcaaattgggcagcctggacctgtagggtcttcacctcatggtccagctttctctggttcatgtaggcctgggccacactggggggttggaggagggaggagatcagctccagctagttgggggtggtctccgggactaatattccattgcagcagtgggagttcagccaagaatcagggctcataattttggccatttttggatgtgatgcaaatgactaccagtacatgcaaataaacccagctccttcctttcactcccaggattcccaggagagccaagctcggagctgactagaaacataccagctccaaaccccaaaaaggagttcctgcagctgagtgggggaagggagggaaaacctggggtgatatccctgaggaaaaagctgggagggaaaaaggggcatggaaaaactgggaaaatccagcaggaggaacacatctggcagtgattggaagcctagggatctatgcaagaagttggagagggaaattgggcccctccctgaagccgggttaggatgggagtacaaaccccctccccaggaaccctgggtcaaaagagggtatcccaggggtttcttctcggctctcagt

SEQ ID NO: 97634 - DNA, 15667 bp, Homo sapiens
ataatatcgtaggtgaagagggaaattaagaaactagacggggccgggcgcggtggctcacgcctataatcccagcactttgggaggccgaagcaggcggatcacctgagatcagaagttcaagaccagccggaccaacacggtgaaaccctgtctctactaaaaatacaaaaattagccgggtgtggtggcgggtacctgtaatcccagctactccagagactgaggcacaagaatcacttaaacccaggagacggaggttgcagtgagctgagatggcaccactgcactccagcctgggtgacagagactccacatcagaaaaaaagaaaaaaaaaagaaactagaaggatccagagaatgcggtaagctcaatattaaaataaataaactgttagagaacttcttgtatttcagtcaagagcttaggaattagttaaattaaaaattaatgctgagctgggcacagtggctcatgcctgcaatcccagcactttgagaggccaaggcaggaggatcacttgagcccaggagttggagaccagcctgggcaacatagggagacccccatctctacaaaaaatagaaaagttagccaaatctgtggtcccagctactcaggaggctaggcgggagtgtcacttgagcccaggaggtgaaggctgcagtgagccatgatcttgccactgcactccagcctgggtgatagagtgagaccctgtctccaaacaaaaaatgctgaaactgtattattccactcgcataccattctcaaaatgacaaaactatagaaatgaagaccagattactggctgccaggggacaaggatggaggggggtggggacaaacataaaggaatagcacaagggggttcctttgtggtgatgggttttgtatcttgattgtggtggtgattatccaaatctatacaagatataaaactgcacagaactacaaacaaacaaataaatgcatgtaaaaaatggtgaaaactgagtgaggtctgcaggccagttaacaatactgtaccaatatcaactttttggttttgattttatgctacagttacataagatgtcaccattaggggaaactgagtgaaaggtacacaagacttcatgtgctatttttacaacttcctctgatctataattatttcaaaataatttccaagccagacatggtaatcccagcactttgggagggagggaggtggatcacttgaggtcaggagtttgagaccagcctggccaatatgacaaaaacccatctctactaaaaatacaaaaatcagctgggcgtggtggtacacacctgtaatcccagctactcaggaggctgaggcacaagaatcgcttgaacccagaaggcggagcctgcagtgagcagagatagcaccactgcactccagcctgggggacacagtgagactctgcctcaaaaaaaaaaaaaaatttaaaaattttgtgcttctaaggataccactaacaaagtaaaatgataatccatggaatagattatccactccactccatggaatagattaatacactgtacttcagcctgggcaacagagtgagactctgtctcaaaaaaaaagaaaaagaaaaagaaatgtggctagtatgactgagaaactgaactttttaaataaattaaatgtaaaaatgaaagattaataatctttataaaaatttccaaaattttagacgttgagaaatgtccagatccagccaagattttagccctttagcttttgtatgagtggaagctgaggctttctccagctccttcccttttcaacatcttcttccccactttgagatcagtatttttcagctccctcaaatcacactttttgcaactgttgtctctagcttacaagcaaacacttccagaacacacacttcagggctaacttctccctccacctcatctggcaacagagccttggagcttatgtcccaaggtcaggcttttccgtcccaacatgcacaccatgagaacttttttacttcactcacctctccagcactggaatccttctgcctgcctctgaattctggttgtagtcaaagcttgaaccatgggagtggctgggaggaaaagaacataaatgtgattgagggaattcagtggggaaacagcttgaccgctccggtctttgacgatccaaaagaaacccttaacacttgagaaggactgggaggtcacttaccaaagggagccatttggactgtctcaagggccccctttctttgagcactggcttcaggccaacatttggaacttagccacaccaccaccaaccccctctcttgaagcccagccagatctcccagtatgtgaagccttgtctactcactctgtgtcctccctcagccctcatccaacccctaacaactcagcagcttccagccctgtttggcccagccagtcagtttggagcttgctaattaaagctaactctgaaagagacctcaaaagaagagggaaatgagtgaagaaaggagtgtggagttgcattcattcagtccaagggaaaataatctgagtaggaaatcgtaaggagaggtgagcagaaagagacttcaaatttcaagagtcattctccagatagatatgtatgcgacttgtgtccatctctaccaaggacaagtgaagctgagcttcaactgcagcagaaactaaggttagacagtgaacaataaaggcccagaaaaagaacagatggaggataaccctagagagatcagatggggacactagatacagataccccatgtcctctgctcagctctagggcaaaggaacagccagtgtgtgggagagaagggagaggctaatgtctgcagaatcctggcagtctctacaccgattgtgaaaatgtcaggcagttgtgccaagaagggtgagggtaatacaggatgggcctgacactctccctgagttggcctaatcttaacatttagactcacttttgagacccccccaacactaacccccattagccctcaccctctgtttcacttatcccatgtcaccattatcttgacacttccaacccatgtccttctcttccaggccccacagctctggaggtgaggcaccaggcatttccaatctgcctctattttgcttgctcactgcagttggaagctggagccagagagtggggaggacagagccaggctgctctgtgatgctctcactcttcccacttctattgattagcccttctctggagcagagcctcttctcaaacactcctcccctgccaggattctctacagctcatgcccagcaagctagaggggcataatgattagagacagagagattcccagaaaagtgctctgggtctaccctcctggggtctcaactgtggtttatgcagtatacagcggtaagactcaggctctggagtcagatagcctggatttgtatcctagctctaccactaatgaactctattacttaactgccttgtacctcagattcttcatctgcaaatttgggatactcgtaataatatttcacagaactgttctagggattaaatgaatacatacatgtaaagtgcttgactatgatgagtactaagaaatgtttagaaagaagatacagtacacatataatttagacacatacacacagtatctaacgtttttattagaatttttattttggcacttaaaatgttttgctttatgctgccacttaagcatttcatgtgcttctcctcactaatcctttgacagttgcacatctcccaggatttgggatgctattctgcaaatagttgaatgaatcattgatcagtaattctcaaatcttactcagaaaattcaagaatgttttcttctaatgcaatcagcacccatttctcctccccctgcaagtaaatataatgacgtcaacttcaactatgccaatgaatcacaaaatgagagaatgccaaagctggaaatagttttagatatggtttagcccagtgagtttcaaccctggatacacattagaatcaccagaacagcttttaaaatatactgataaggccaggcacggtggctcacacctgtaatcccagcactttgggaggccgaggcgggcagattacctgaggtcaggagttcaagaccagtctaaccaacacggtgaaatgccatctctactaaaaatacaaaaattaggccgggcgcggtggctcacgcctgtaatcccagcactttgggaggccgaggcgggcggatcacgaggtcaggagatcgagaccatcccggctaaaacggtgaaaccccgtctctactaaaaatacaaaaaaaaaaattagccgggcgtagtggcgggcgcctgtagtcccagctacttgggaggctgaggcaggagaatggcgtgaacccgggaggcggagcttgcagtgagccgagatcccgccactgcactccagcctgggcgacagagcgagactccgtctcaaaaaaaaaaaatacaaaaattagtcaggtgtggtggcacatgcctgtaatcccagctactcaggaggctgaggcaggagaatcgcttgaacctgggaggtggaggttgcagtcagctgagatcatgccactgcactccagcctaggcgacagagcgagactctgtctcaaaaataataataattttatatatacatatatacatatacatacatatatacacatatatacgtatacatacatatatacacatatatacgtatacatacatatatacatacatatatatagtgatgtttggtcttcactccttagattctatttaattagtctggaatcaaggcttttttttttttttttttgagacagagtcccactctgtcgcccgggctggagttcagtggcgtgatctcggctcactgcaacctctgcctcccaggttcaagcgattctcctgcctcaggctcctgagtagctgggattacaggcttgtgccactacgcctggctaaattttgtatttttagtagatacaaggtttcaccatgttggtcagcctggtctcgaactcctgacctcgtgatccgcccgcctcggcctcccaaagtgctgggattacgggcgtgagccaccgcacccggctaatcacggcatttttataagccttgtgatttctgtgattctaatgtttagattctaatgcttagccagggttgagaaccaccgatttaatccaatcccttctcctagttttactaaagagaaaactataacctagaatggtgagcaacttgcccaaagtcacccaacatgttagtgcaaggtgcaccgagagagattgtaccagtagcaagaatatgctcatgatgtttataattgttctcgctggagttaatcccggaagcatttctttttagttcacagaggccttatataaattactttttactttggcacagcacttacgcttctgctaacactgaaatgggttcgcattcctgaccacaaaaggacagagatgaaattctacattcacacagcccgccaagttagccaagctccctaggaggctgtctgaagtgcctaaaatgcttctctacaatgatcacccagagctgagagacttcagtggggtagtgagaagaaagagggttgggagagacaggaaagcatcctctccttgagggaaggaactgggaatcaactgagaaccagctagcactgccaggaggtgaggagagggaaggagaataatttaaatgaggccagggagcttctgctccctcaattaaacggtgatagacggcctgacaccaccagccctcgaagcctgagatccacaggaaatgttaaaaactggcttggcaatataagtattagaaaatacttcttccaacactcaccaaaaactaagctcccaataaagaacacttcacctgccctccgcaaccctctacctctcttccccgccaagatcttcacccaaggtctcaagagggcggttcccaacctcacgtgacacagcggtcacgtgacatggccccggggagccgaggtgagcgttccagcttccggagccggagggggcccggcgtacccagcccccagcccgacgtgaccatgctgtcccgcctcctaaaagaacaccaggccaagcagaatgaacgcaaggagctgcagggtgagccaaatatcctgtcggccgttttctcttcggccgcggcctagcttcagcccggagcctggatctcgagtaactaaccatatccagggaaagacgccagctagcgggcaacgggcatgggggagagggaatttcagagaggctttttttgaaactcctttcccttgccaactggctccggtcccttgggcaatactccggtcccctcggcaacgcccccaatccccgacctgccgcaccttagccccgcccctgccccggagcgccctgcctattggccctgggagcctctcgtcctggcggcgggaaggagcgactctggagggaggagggtgtggggaaccccccagagatgggcttcttggaggcctgaaaccaccggaacggaggtggggcacttgtttcctgagtccgggctggaaatctcggagttaccgattctgcggccgagtagtggagaaagagtgcctgggagtcaggagtcctgggcgctgccgctgacttcctggcgtccctgagtgagtccatttccctcccagggtaccagtttcctcatctctaaaatgaaagaggttgcgctatgttttgcaaggtccttttcagctccggcattcagagattagttaagaaatttcggcaactagcagaatagtaatggatgggtagggaacctttaacactacccctcaaaaaaccaagtctcccctccaattccttttccccctctccccagaaaagaggaggcgagaggctatcactgcagcgacctgcctgacagaagctttggtggatcacctcaatgtggggtatggacctcttatcaacatcagtttcctccttccccaccccgcccaagtttaggcactggccagtckggccctcaaatagctgttgaaggggtgggatgttccactaattcccctatcctaccccgcccctcccagctctttgtagagcaacttgagtcaactctgagtcctagcactgggcaagggaggaacagctgccgtggttagagaagcagccagatttccccttccccacgttaacttccctggcatttacaacttgatgccatctgcccacctcccttcacccttccaagtccagctgtcacttcagcaggagggagagcaccctccttcattacagcttaccaccctctcctctgcctcccaccctctggcaagcctggggagcagctggcaggaaagagatggcagagctggtggtggtgagagtagaacctgttccgggagctatggcagagccaggctgtctcttaccttcctattgggtctctagggaccacaccctgccccagccctaaatgagaatgcmagtaacagccaaagacttgggaaaaagcaaagaacattgtctcttgaccctaagtgacccagaagcgtgcagagatgatgatttgctagtctgcctattggaagaaaggcagtatggtaccttccaccccaggtcaagtagaacagctcggtgtgaatccagagactgagtcatccaagtgagccatgcaggggctggggtcatctttgttactcatcttgggggaaggttgagagaaagaaagttgtggctggggcctctgatctcccttctctccaggcagctctctttactcagtgtgaatatagaagcaggtggtcaatggggaaaaccagaagttcargaattctcaggggagtctgtttcagttcctacccgacccttgacagtgacccagctgtctcccaaaaagaaggaacagggtctgccctcccatttcctccctcccacattggcacctcctgggctctgctgtgcccatcatttgtgagattggcccaggcctttccctcttcttttcctttgctagatgccaccccactttcagcttagagggcagctaagccaaagccagattagaaagggttttgtgttgctgcccacgcctcctctcattcccyggaaaggaaaacaaaggctcagtctatcttggcccctgtcaggtgtyctgcccactccctcarcccccaccaaccccttccccgctccagcccccacacattccagtgggtgggggcaccggatgtggaatctcctggctgastagagctctggggtgggaagtgaaaaattcaacagccaataaaggagaacaattattgcaggggttggggagggcaaaaaacactggcagaaggttggggacaccaaccccatggtagtaatggtaaccacagcccataccttgattgaaaagaaaaactagtgcctaaggcagaagggagggagagcatgtgtgtgtgtgtgtgtgtgtgtktgtgtgtgttccttgatctgtgtgggcaaaagcgaaggcttgggagagcaactgagagccgagaagaaacccctgggataccctcttttgacccagggttcctggggagggggtttgtactcccatcctaacccggcttcagggaggggcccaatttccctctccaacttcttgcatagatccctaggcttccaatcactgccagatgtgttcctcctgctggattttcccagtttttccatgcccctttttccctcccagctttttcctcagggatatcaccccaggttttccctcccttcccccactcagctgcaggaactcctttttggggtttggagctggtatgtttctagtcagctccgagcttggctctcctgggaatcctgggagtgaaaggaaggagctgggtttatttgcatgtactggtagtcatttgcatcacatccaaaaatggccaaaattatgagccctgattcttggctgaactcccactgctgcaatggaatattagtcccggagaccacccccaactagctggagctgatctcctccctcctccaaccccccagtgtggcccaggcctacatgaaccagagaaagctggaccatgaggtgaagaccctacaggtccaggctgcccaatttgccaagcagacaggccagtggatcggaatggtggagaacttcaaccaggcactcaaggtgggccatactccctacctcaccaccccartcctgggcccccattggctgcctccagtcaggttacctcaggtttaggttaaggaggaagtagggtggtcccagaaaccccatctatagccccagtgtcagaaaaggtagagaaagaaagaaaagcagttggtgggtccaagtaaagccttttccaggagatgaataaaacgtattccccagactggaagccatactctacccattctgattcctgggctcccacctcctctcccccttcccaggaaattggggatgtggagaactgggctcggagcatcgagctggacatgcgcaccattgccactgcactggaatatgtctacaaagggcagctgcagtctgccccttcctagcccctgttccctcccccaaccctatccctcctacctcacccgcagggggaaggagggaggctgacaagccttgaataaaacacaagcctccgtttctctgtggtgtgtttcagagagctactagctccagtgtcgggggtgggagtggaaggttcaaaggtggtttccctgagggacaggtaccttttggggagagggtggaactagcttcctcttactatcccaactctcttctcctccatggcccttgtgcaggtgtctgttaggcaagcagagggtgggagttcccatccctcctgagagaaggtcctagtagccctgccccaagcttcctaattcaggacttgtttcctacagaagagaaacaaggcaaggtacaggcctggtccccagctctggctttctgcctctccacgtgctcatggcctctcccaggctaactctaagcagtgtcatgagtctgagccaggtgggagattaattcctgggggcacttcagggctgagaagggggaggaatgacaggtccagtaaccgttaccaacagagcagtgcagctgccatccttgacagctccctcctccttggagaccatgacatagatggtcaggaacccaggctgagaaagacagccaaggggtggggggagcctaggcaaatctggcctctgccaagtcctggcttcagccaggcaagctccagcctccctggctcctcctcctcctcagtcctatccccaccctgtcacacatacacttaatacgcctggcatccaagtccacccactccggactttggccttagcagtagttagtgtgggaggctgggaagactgggagcagtctcttaaacaaaagcaaaagaataagcttcgggcgctgtagtacctgccagctttcgccacaggaggtaagtggatactgggagctgggggaactgagaagactagccagatattacatgtattgccaactcaaaactttcagcttttaacatgcttcctcacacattatcccctttgatcctccacaactctgaggtggacctggtgggtcttagccccacttggtagatgagaaaataggttgagagagacagtgagatgctcagtatcacacagcaaacctcttggccctatacatcattccaaacacaagacccaggttgcatatagaaggttcagtgtccctggtttagaaggagaggtggtgtgaggcaagcaagaagatgcctctgctgcactccagccctgggcgacagagtgagactccatctcaaaaaaaaaaaaaaaaaaaaaaagatgcctctgctccatacagcaggtctgtacacaggatctggctcatgtggttttagttaagttagccacaaatacagcgtctgcccacatctttgctttgaacagatgagccatggttggccaattatctgccaaccagataatttctcaatatgctcacaccagatgcttccagctagggagggtattaggggaaagggcttgagggccacagtaaactggacaagtttttctgcccagcctaggctgccacctgtaggtcacttgggctccagctatgtggctgcctcttctgctgggtgccttactctgggcagtgctgtggttgctcagggaccggcagagcctgcccgccagcaatgcctttgtcttcatcaccggctgtgactcaggctttgggcgccttctggcactgcagctggaccagagaggcttccgagtcctggccagctgcctgaccccctccggggccgaggacctgcagcgggtggcctcctcccgcctccacaccaccctgttggatatcactgatccccagagcgtccagcaggcagccaagtgggtggagatgcacgttaaggaagcaggtaagtatggtagaccaccaggaatatggtgtggggtgtcctgatccccacagtcaccccaggagtcacctgcaagggctgtggtaagctaaagggacaatttgaggagaagcagttttcagatgctcccaggaagaagagggagctgtgggagtgcctcacctacccccagcatccttttcatctccccacagggctttttggtctggtgaataatgctggtgtggctggtatcatcggacccacaccatggctgacccgggacgatttccagcgggtgctgaatgtgaacacaatgggtcccatcggggtcacccttgccctgctgcctctgctgcagcaagcccggggccgggtgatcaacatcaccagcgtcctgggtcgcctggcagccaatggtgggggctactgtgtctccaaatttggcctggaggccttctctgacagcctgaggtgaggggtacagggctctgggttccaggactaacagcagcccactcaacaaacgtgggccagcagaggtggttaagatacagcacattggaatagttaagaagagacagtttagggctagacttcatgggttcaatgaagtctacccttatgtaagctttgtgaccataagtagattacttctctttacccatttttaacgtgtttgttttttgttttttgagatggagtcttgctctgtcgccaggctggagtgcagtggcgcgatcttggctcaccacaatttccacccccggggttcaagcgattctcctgcctcagcctcccgagtagctgggactacaggcatgcgccaccatgcctggctaatttttgtatttttagtagagacagggtttcactatgttggccaggttggtctcaaactcctgacctcgtgatccgcccacctcagcctcccaaagtgctgggattacaggtgtgagccaccacgcccggccttgcctctcgtctttaaacaataaggttcaaagttccgtgggagcacaaaggagacatgatgaggacaacgggagtagggcctgagtttttttttgtttttttttttttaagcgttttgctcttgttgcctaggctggagtgcaatggcgagatctcagctcactgcaacccctgcctctcaggttcatgtgattctcctgcctcagcctcccgattagctgggcttacaggcacgtgccaccactcccagctaatttttttgtatttttagtagagatggagttataccatgttggccaggctggttttgaactcctgacctcaggtgatccacccgacccggcctcccaaagtgctgggattacaggcatgagccaccacacacggcccaaggcctgagttcttagcaggagtataaggcgcctaagcttagtctaccttctaaggaagcctgcgtttgtcaccatcactcagcaaataacctgaatgtctcctgtctctcagccttaatttttcaggcagcatcatgggacacatacttttagttttgagacaaggccttgctctcacccagggtggagtgcagtggtgcagtcacggcccactgaacttcaaactcctaggctcaagcagctcaagcgatatccgcctcagcctcctgagtagctgagaccacaggcgcgtgccagcatgcctggctagtatttttttacagatggggtcttgctgtggtgaccagacttgtctccaactcccggcctcaagcgatgcttccgcctgggcctcccaaagtgttgggattataggtgtgagccactgcatactggaacacatactttatacttgaatttttttttatccccttccctcctgctccttacctatacttggatttctacatctgtgccagggcagtgggatgtatccccactttccccatcagcttaccctccagcaaatacgagactatacccttcaatatccagcactcagggctcaaccatgtgttttgggagcaagggaatggggttcctctaggtcaggaatcggcaaactcagtactcaagccagatctggccagctgcctacaagctgataatggttttttttatttttaaatggttacattgtaaactgttatataagtacctgataatatcattaattttgtttcttggcctgccatgcttaaaatattaactctctggccctttaagaaaaaaacgtgctgacccctgctctagatcaaagaaaacaaacctcaaaaatactttcctccctctaccccacttgacccttgtcccggggcagtaggcatctccgtcaaaactcttgtccctggtctgtggtaactttctcagctccccaacccatgtccctcaaagtcccctccctatagggcaagaacccagcaacttcgctctgccccgactctaggcgggatgtagctcattttgggatacgagtctccatcgtggagcctggcttcttccgaacccctgtgaccaacctggagagtctggagaaaaccctgcaggcctgctgggcacggctgcctcctgccacacaggcccactatgggggggccttcctcaccaagtgtgagtagccaggcccacacaggggcacatgaagggaaacaagtaccagaaaggccagtcctgcataagcctgctaggaggtgggtggggcacccagggcagggttgagggtgaacaggatgttacaagagtgcccaggccatgtggaacctgcccactccccacactgaggaggggactgagggtgacaagcccagggccccagaagacagtacctaagatgggctggagtgaggaagggaaactgattgcaaccacctatggggctgcagacctgaaaatgcaacagcgcatcatgaacctgatctgtgacccggacctaaccaaggtgagccgatgcctggagcatgccctgactgctcgacacccccgaacccgctacagcccaggttgggatgccaagctgctctggctgcctgcctcctacctgccagccagcctggtggatgctgtgctcacctgggtccttcccaagcctgcccaagcagtctactgaatccagccttccagcaagagattgtttttcaaggacaaggactttgatttatttctgcccccaccctggtactgcctggtgcctgccacaaaataagcactaacaaaagtgtattgtttaaaaaataaaaagaaggtgggcagaaatgtgcccagtggaaggctgaccccatttaagtgccaactactccaaaccgacatgctcacggtctctggcctgttcagtccctgcaaaacagctagcacccacagtggggcgccagggaactgcctcacatctacagctgcacgtcggggagtggccatcaaagggcactttaatacatttcccttattttctgaaggggagtaaggttgcaattcagtgtctgtactgggaatggtcttcatatttcttgggggagaagagcaggtgatgagggttctgggccaggctgggtggcttccatggaagaaaaggcaatattcacataaattctcctgctaaggacactgaccacacaggtgtcaaggcaacttatcatacttcgaaaggagctggatcccttgaggattggccaggaagggaggtgctgggcccttagcggtgcacagaaggccaggaagatgtccaaggcagatgggggctgggctctcgcaggtgggacctttctggggagctgctttgacttatgcagcagatggcttcatgaatgttcatagtgagcctggcagcataagactagggggcagaaagcaccacagtctctggatcctcacttctcccactgcctgcccaaccaacaccttcgcaaagtcctcctttcccaaacaccccccaaaatagacctcgaagtacacatgcattaaggtcccagaggacagggaacatcagtaaggaaaggaaggaatcaagcatcactctaagacaaactcagaccatctcttttcggtctgaaaaaataatccgtttaattgaaaaacctggaggatactattccactcccccagatgaggaggctgaggagaccagacccctacatcacctcgtagccacttctgatactcttcacgaggcagcaggcaaagacaattcccaaaacctagaaggaaagatggggacaggggtggagaggagtcagaagggctagctacctcagacccatgcaagagactccaaac

SEQ ID NO: 97635 - DNA, 282553 bp, Homo sapiens
ggacaatagtggagggaaggtcagcagataaacatatgaacaaaggtctctggttttcctaggcagagggccctgccgccttctgcagtgtttgtccctgggtacttgagattagggagtggtgataactcttaaggagcatgctgccttcaagcatctgtttaacaaagcacatcttgcaccgcccttaatccatttaacccttagtggacacagcacgtttcagagagcacgggccatttaacccttagcggacacagcacatgtttcagagagcaggggccatttaacccttagtggacacagcacatgtttcagagagcacggggttgggggtaaggttatagattaacagcatcccaaggcagaagaatttttcttagtacagaacaaaatggagtctcctatgtctacttctttccacacagacacagtaacaatctgatctctctttcttttccccacatttcccccttttctattcgacaaaactgccatcgtcatcatggcccgttctcaatgagctgttgggtacacctcccagacggggtggcggccgggcagaggggctcctcacttcccagatggggcggccgggcagaggcgccctccacctcccagacggggcgccggccgggcgggggctgccccccacctcccggacggggccgctgccgggcggaaagcggaaacgctcctcacttcccagacggggcggctgccgggcggaggggctcctcacttctcagaccgggcagccggtcagagacgctcctcacctcccagacggggtggcggcggggcagagacactcctcagttcccagacagggtcgcggccgggcagaggcgctcttcacatctcagacggggcgacggggcagagatgctccccacatcccagatgatgggcggctgggcagagacgctcctcacttcctagacaggatgacggccgggaagaggtgctcctcacttcccagactgggcggccgggcagaggggctcctcacatccccgacgatgggcggccaggcaaagacgctcctcacttcctagacggggtggcggccgggcagaggctgcaatctcggcactttgggaggccaaggcaggcggctgggaggtggaggttgtagcgagccaagatcacgccactgcactccagcatgggcaacattgagcactgagtgagcgagactccgtctgcaatcccggcacctcaggacgccgaggctggcagatcactcgcggtcaggagctggagaccagcccggccaacacggtgaaaccccgtctccaccaaaaaatacaaaaaccagtcaggagtggcggcgcgcacctgcaatcccaggaactcggcagactgaggcaggagaatcaggcagggaggttgcagtgagtcaagatggtggcagtacagtccagcctcggctcggcatcagagggagacggtgcggagagggagagggagagggagagggctatacttttcttaatttaaaaaattacttgtacctgatttcacctcctacttccttgtcacctcctttcagggctccttttttttttaatctgtcccattaatgatgctgttcttcagggtttggtcttaatcactaatcttttctagggatcacaaactagcctgacaaagttcagggatagctttcttttccagggctaacagtgttggaaataactgatgtgaatgtctttaagtaagacagacagacactttactactccctgttgtctgccatttatattacctaccaggctcctaaaataagttcatgaccccaactttacactccctgattttgtgtcatgtgctgggtttatagtagagaacaaaaataaacatgttctttgaactaactaagctttcagacaaatgggggaaacacagttgaagacatttttaaaataatgttacgcttagggcacagtgatagtttaacaacaatactgcttaaagctcaaacaaatcttttaccattcaacccagtgctcatttcattaatctctatgctaattactcccctgtgatttttcaattttacattgagtataagtcaaccttcaaaattttaaatcctcagagtttctaatatgtataaagtttctcatagatgataataacaactacatatatttgtagaacatgcgctatggctggctaaatgctttacacaagtcaatttcgaatactgtaataatctccattatacagagaagaaaacttgaattaaaattaatttgcctcatgtaatacatagtaaacgaggattgaaactcaggtctgtctgatgctgcagttagctcttttaatgctctagctataatttctctaaaggatataattacgaagcattttccaatatatttaatgacagaatcctaacacaggaacagctattaacatttatttgaactagtattctctaaaacagtttaggaaatgctagtttaagtctctggactaaaatgtaaaaaaattaagactgtgagattaaaatagatataagaatgacatgcacagtaattgaaaatataaaacatttatgaagagagaagcacagaaaactgtagaccaagtatgttaattgtgtttggtgaggatcaagaccttttctttttcctttactaaattaaaatggtaataatgcattttttaggacaaaagcttttgaaacatattatctaaatcattctgtcccttcacattaattttgtccttctcaatgttaattatcatacttcatcaaacctaaaaagccattaatcatacgatgcctctaatgcagaatcccaaatactgtacatgaatttatagtacatcttaatcattaaaatacacacacaaaagatgatttttgagattctgagatcttcactatcatttttgtttactgagcaatttcctcagtagtcctccccacccacaccatctaaattgcctgcaatctttttgaaaaagcaaaatctctgccccacgatgacaacattgggaatcaaacataagtaagttactactttgaaatcaaagttttacaggcagacttttaattttagaattcttatgctatataggaacgctacacaaatttgaaagtgtctctactcaaaacctctaatttccctatttcagaattacagtaggtaaaaatttacatttttgttggaagctttaaatactatacaagaaatctaaaatgccatcaattgtaaaatggcttcaatcccaagaagctctattattttatgtacattatgaaaaaaaacactattgaatcaactgacccaatgctttcttattacttagacacatcctatattatttattgacagacttcttttaaatttaaccctggatttttatcttgtatcaccctttgtttccccacatacacagtaacttttcattctaatgctaatcataatcttctaaatgatctttaaaagggaaattacactcaacaactatatgccaatagtgcatatataactcaactgaaataatgacaagattaagttatgactaagtgggtgtaagtgtgggcaatgacaaatatctcacaactgccaattcatctacagtgatttaaagatgtcaacaacttaaaaatacatccctatttcagagatgttaagtaagagaaaaatgtgtatctcagaattgatggaatatagtaattttaatcattttcttcctttcttctcctcccttcattcctattcttgccttccaacttctttccctgatttgctacacaatctaattactggatatgtaaaaatattatagtatacataaaataccccacactgaaagaccgtccttattatagtgtaaagcaatgtggtaccttttagcactaggtgaaaattcctgctaggatttaaatcatatgtgtcaaaagtcagaatttaaagaagaaaattaaatacactgagaacaatgcatctgaagacactcaaaatatgtaagcgcagcaaccagcagtaattccctaggtcttttatcaacctttgccaaaacctataaaaagaatatctaaaattgcttttttatggaagttcctatttcccttaccagacagcctgctttccctttactgatgaggacatagggggtcctggagggtttaaaggatggctataaggaatgactatagggtggacagctatgagaggccagtccatgcatttctaaataccatcgtcattaacacaaaaactttcctccccagtacagagtccataaaatttaaaaaggagtatgccttggcctcccatgaccctcttacctcacaataaggccatcttttacctggttaagatttgcagactagacccattacataccttgtcattaaatacctataatataccctaacctttgcaatcttgacagatatgatttccattttatagacagatccaggaaaattacatgacttatctgaatcccttcaagtaccacatagcaaagccatgattttaacttgtgtttgccactctgaaactcacactggaattcatttttcaagtgtcctccaaagcctaattaaataaaattaaccctgtcatctataatactcttacatatccaaattaagtgcatcaagaatataactggccatttcttaccacccatagtcaaaccaccattatgcttcctctggattattgcaaaactcttcttattggtctcctttctcctaccacgtcctcctctgtgtattttccttaaagagtgaccctcttaaaaggaagtcagagcccatcactctactgctcaaaacgctccaaagtcctatttcatttagaataaaagttagatgtcctcaagatcttcatgacctgctcgccttgatttaatctccagtgaaggactaaacccttcactcaactctgccctacaggcctccttgctattctagcacgtttctgcttcatgacctctgcaatggctggtccctctgtctgactgcactttcccaagatattcgcgtggttaaatctcccacttctgtcagccctttacttaaaagtcatcttttcagcaagaccttcctgtgtcactttatacccttcttccctgctttacgtttctcttcaggactatcacgacctaaaatacagtatgtttctaattactttgcttagtatgtgccttcctctctaaaatgtgagctacaagtagacacagatttccgtctgttttgttcactgctgttcacctaatgcctagaacggtgtctggaatagagtgggcgcttaataactattcgctcaatgaataaattcctgtcttcaccctcctctcccccaaagcacctaagtcctttgacacacacattcacataacagtaaatacgcttagggatcgatatttttctgtagcattcttaacttaggcctgcatcccatttctcaaacgtggctcctttagaaggaagtctcaaactctttcctgtttccttaggccagggctggtcctgctgcgaacggactacccattagcagcgcaggccaggtcctctctcctggaggcaagttagagaaggaagacccctacgatcgcaatcggcgatccccgagtgagtgacccgccacgacgtcactcacatgaagcggaggaccacgggttccgagacagccacagcaggaagcatgtaggtccagccacccgcgtactatagcagtgagaaaggacccaatgaggtgtccttgctgaaagcctgagtgttctacagattcaaccctcaattctttcttcctcttcctgtgctcagtcccattaacctgccataccacgctcctcgtcttccattccctcacccagtattttcaatcgaccccccccgtccccccgcacctctttctctctcgctatatgtcctttcgtggccagtttgggcaaggggaaggacaccacaagtcggggtctttcctcagcgttgggtcgcggtggctgtgagggcggaagaaaaggccaggctgaggggagggtagagggtgaaaagctcggatctgtgtttggggaaggccaggcttgcgctcctcgccgggttccgcgaaggttaaccttggctgacttggctcgcgagcaaagggcagcgtctgagctcccggcgttccaggagtggcctcttttgtaggagcacctgaaatgcagcgtctggtgcactaagccgtagcggcagcagcagccacagcgacagcgctggggccctgtgtagaagctccatcccccttgtctttgtgcttgcctgcgtccccagactcagaggcaggtatttgggtaatccagttttccgtgtcgtagtgggtggggtctgtgggaggtagaggactatcaggagcagtgagtggccccgcatgtcttcagaatagatagagaaccgagctgtggagccgcttgctgataggtactgtctccatccctagctacagcccgcctttcctgtaaatcaggttcacctgagtcgtttgggaaccgtaggcttagtaatcgctctgtcactgcctcaaaggaaggctaaaggaggttagagaatctagaatccgcccctccattactcaccttggaggcagaattttgctttggtttgtttctggccctcgaggtttagtcagtcgtcaaagtgtaacacccccttgagcagtaggagaaagtgaagcagaggaaggaagttacttgaggattgtcagtggctgcttttcaaggayccctgtcctggtttctatctatttgagacaaaaataacctcttgagagaatgtatatataaaataaatgaattagtatcattttcctgttgaagaaatgtgaaattttattcatgataaaatcggcgtcttttgccctattttttactttctttccccattcgagtcgtttaaaactctaagttctttgagggcacagagtctgacttgttcattatcctttgcccaccagctggaaaaacaactgacttaaaataggggcttcaaaatatttgttgaatgaatgaattttcaagcccaactgcttgcactgctgtttccctcatctaatctctcatctctacgttttttttcccccggtagttttcttccactcacgaggtgtaagtgaatgtatgtgtgtgtatttttgtgtgtgagcctttttatgtacaaccatttaagaggtagtggaaaaagaacactgattatgctaattagtgttttatctttttcgatcattgtgttttatttggttattttattttcagctatgtgatgataaagacatctgattgaaaataaaatggtcgggcgcggtggctcacgcctgtagtcctagcactttgggaggtcgaggcgggtggatcacctgaggtcaggagttcaagaccagcctggccaggatggtgaaaccccgtctctactaaaaatacaaaaattagccgggygtggtggcgggcgcctgtaatcccagccactctggaggctgaggcacagaatcgcttgaacccgggaggtggaaggatgcagtgagccgagatcatgccactgcactccagccttgatgacagagtgagactctgtctcaaaaaaaaaaaaaaaaaaaaaaaaaatcaagtagtatagcgtagtaggattgaataataaagtgcaactgtctcacctgtcctactctcagtactgttcttcaaagataaccacttttaaccttttctaattttaggtctgtaggttaaataataagttaaactgttaattctttttgttgacttcttgagatagccctaagttgaactgctaattctttttccgttgacttctagaaatagcccacaccattcacaatctcctctgaattttggaagagtcataatcataatttttagtttttgtattggttactttataattcaaaataatatacgtaaactacttttttcacatcaacttttgaaaatatatttgactccttgtttggtaaaacgagaaaagtagtgattctacctttttctttatcacttcagaaactacatttatgcccactttctcttagctggacatttacttgtacattgtcaaagttagtaatatatttcttaactataacatttgcgctttattcacgtgccaaaaaccaataaaaaaaataaaatgtttacagtattatggctttatagttgttacttagagcaagtccaagctgtatgctctgatatgtttttttccccagagttttaacttcatgatccctgtgccatactaaggagattatttatgatatcaaggtcaaatgggtttttatttctttcctgccaagggcaaratatgctgtagttgagcatgctttatattttggagtatgtaatacatagtttttaaccgtccccactttcttaattgcctttctgctttctcctggggaataggtaggtggatgtgctttcttcactgaatcttctcattctttgtatgatgcacatagaagcaagcttccattcctctgtttgaagattttccccttaaagcccaatggctttctgtttaatttgaacagattgcattctagtccttttgtattgctcctatcctgggcttatattcattcttgggtaaataacattgtttcttagcccctcatcttctgttattgggcttccccctatttccctggaatatatcctaaggaaacttgctcacaaaaggcaagtgaaaggtaattttattttttaatgttcgtatagctgtaaattataatttgctcttatgactgataatttggctgtatatagaatcaaaagtattttccttcaactctcaatccttccatgtcttctaactttttttttttccttttttttgagctggagtctcactgtgttgctcagtctggtctgaaactcctgacctcacgtgatcctcccacctcagcctctcaagtatctgggatcacaggcacaagccactgcaccaggctctcttctgactttcattattgctgatgagaatgccagtctcactttaacttgttgatagcagaatcagttttttctgtctgaaatgtttacaattttctagttacgtttgatgctttgaaaatgtatagcagtgtttatcttctcataagctgttttattttgtgtgagataaaatttgatacatattaaaacacattgattttaagtggccaatttaatgagttttgatgcatgtactcatccataaaaccactaccaccacaatcgagatagagaatatttctaccactacagaaagttcctctgtttctctgcttattcaacccctctcccccatctacagtactatcttctgatttttttattaatactatagtttagaactatagttctggaattacatttaaatggagtcatacagtatgaactcttttgtgtctgcttctttcataaactttatgtttttgagtatatccatgttttgacatgtttgttccatttttgttaaatagaatttcatggtacaaatatgttaattgattcacttatgggacatttgcattgcttctggtttttagctattaagagtacagttcctatgaacatactcatacagtgtttttttttatggacaaatgttttcatttttcttggttaaagagtggaatttctgagtcataagttagggatatttttaactttagaaaagttttccaaatattttccaaaattcttttgccattttacgctcccactagcaatatagcaaagctccacttccacattctcaacacttgttactgccagtcatttaaattttagccattgtagaagttaaaggtttgtcattgtgattttcatttgcatttcccccaattaatgatattaagaactttttcatgtgcttattattttcatgccttgtgtgaaaatatgtttgtgacttttacctatttatgtattggcttgttttattattgaattgtggtatttctttatagactccgaatacaggtcaattatatacagacacacatatgtttgattttaaaaggtcatatatatacataatgtcatatgtatatacagacagatgtaaataatatttccctttaactcgaatttttattttctcaggggtgcctttggatatgcagatgtttttaattttgatgaagtctactttgtcaaaattgtcttttgtggctagtgctttgttctattgtgtctaagaaatctttgcctagcctaaggttgtaaagatattcgcttatgttttcaattagaagactaacagttttaccttttacgcttaagcctatgttccatcttagatttttgtggatgtatcagtagaagttgaggttattatttttttatatgaatatctttttccagcaccatttgtaaaaaggactttccttttcctgttgaactcttttgcttttgttgagaatcaatttattttatttaaattcttttaattatgaaatatgtggtattaacacacacatatgtagataaatatagatacagagcatggaaattaccaagcataatgataacatgaacacccattaattcaccagctaaaaactaggctattactcaagatttttgaagctttttatgaatttttccctaaccttaccccactttaatttggtagtaacccatattctgagtattttttttaaattcccttacttattgaatatattcttacaatagatataagtattccagaattatttgttttattttttgtttttgagttttatgaaaactggaatattttatgttacttttttcactcaatattatatttctaagattcatctatgctattaaatatggctatagtttgcttatttttcattatgtatacaggtgaataaagcacaatttatttaaccatttacctaccattggacatttaaattgtctccagcttggggatattaggagcaataatactgccttgatctttcttgcacaggtccactctgtgtgtgtgtgtgtgtgtgtgtgtgtgtgtgtgtgtgtgtgtgtaggagtttctgtaggaatataatagcaagatagtgtaaaacatatctagtgattttactaatttacactcccacttacagcaaattagagatcctatttttccacatccttctaacattatgtgttatcagatttcttaatttttgactgtccagtagataaaaattttttgtggttttaatgtgcaattccttgattattcatgaggttgtttatcttctcatgtatctattggccatttctctttattcttttgtataatgtgtttttctataacttgttttatgtaatggatgcaatatctcctcaaatctctctatgtttgttagagttggtttttgtgttattttttcataaattatttcagttgcttccaaagccagatttttggaggtttatttcattgtttgcccttgatactgtagtctttcctcaactatctgatgattctcagacaactcattatttaagagctaaggcttcctgggagctttgcatatatggacaggcttattgacggatatattttgttttaggatggctgggtgaacagccaaatcttagctggggtcctrcaaattccggaattgtgaggagtttgctcttctcaccagtgtccatagcaactagtgtagttctcagtttgttcagcttctttagggaagaaccttatctttttctttttttcatggagtgtaaataactgccaatgttgtggggctggtggcagaattgacgcttctaattattcaacacttcacccttctgatttcaaaccctctgactgctgtttaacattgttcccgccttctctgagtctgaagcctctgaatctgaagggaccaaacaaacctcttgactattacaggttgtagcttatttctttctgcttcactcttccttatatattttgttttgtacaagtttctagaaatctttcatcacctcatggcctgtttctcttttcttccttgttaagggtttatacgttttataatattttatttttaatgatttcagtaaggtttcttgtcaaagtggatttattgaattggaattccagcatatttatcattaagctgagaagggaaaaatgcagggctttaccagtagaatgtcttcttagtgaggtccatgggtaaaagatttttgtgtcagaagacccttttttttgttgttatggttgccttaatgtgattcagattgatatggagcaagtttcctactctccaggctactactttacgcaactttggggcaccatttattttggagtaagtgcaaataggacgcctcatgctatacacatggaacaactatctctaaactggagccaatagctctgtcaggattattaaaaggattaaagcagatcatacattatgtaaaatatctagcataaaaatgaaaattggttatttaatattatagagccttcttttaatctagtttaagctttactactattaataaggtcccctattcgttactagttggtacctatatttcctctttcctgacctacctcactgtatgagaaggaaggttgtcagtggtgtgtgggttattcaatctttaggtaaagagaggagccttattggctgggtgtggtggctcacgcctgtaatcccagcactttgagaggccgaggcgggtggatcacgaggtcaggagttcaagaccagcctggccaacatagtgaaaccccatctctactaaaaatacaaaaagttaactgggtgtggtcgtgggtgcctctactcgggaggctgaggaaggagaattgcttgaacccgggaggcagaggttgcagtgcgcggagawcacaccactgcactccagcctgggtgacagtgcgagactgtctcaaaaaaaaaaaaaaaaaaaaaaaaaaaagagaagagccttattaataatatgaagatgcagtaacaaacttcctctactctttaaactgtcaaatgtcattgagaatggaataatcttttcttttttrtgccattgaaaatcttagagtttgatttagagctgcaatataaatttatgctgagttgttttgtcctctgatattttagaattttcttatactttgatatttttactgtgaagtgttcaggttggcattttcctccaagttgtatgttaatcatgcttaagatttggtctgtctggcttaatgtttggtctgtcctaaaattctctccttttccagattatcttagaagacctaggactccaaaaatgtttcccctgaaggacgctgaaatgggagcctttaccttctttgcctcggctctgccacatgatgtttgtggaagcaatggacttcctctcacaccaaattccatcaaaattttagggcgctttcaaatccttaaaaccatcacccatcccagactctgccagtatgtggatatttctaggggaaagcatggtaagttattttcttttttttcctatttrtgttctctactttgttaccctaagttataaatactatatccactaaatatataaagctatcatcagtaccagtgcacacatgtccttctttctctcatccttttcccccaccctgcctctctctcgtacacttccccatttacttgcaaatctaccaggtaaaattcaaactctttactaggctattgcatacaaaatccttcatctagtccttgatctagtctgtgctgtcctctttcgatgtattgcttgttgtttccactaatttaacccttcatgccagccaagctgagttgctttgaggttttttgattcacatatccttgattttgtactttgcaattttctctcatggattatgctatgctccattccctgcaatctgagctaagtctttttcctaagttcttttatagcttttatcacattttattattttctatttaatttttctcctctgaggattcttagttcttgaggataaggacctttacttgtgacctcagagcactcaataagtgtttgttagctgaatgaatgaattaacaactatatttgaatgattaatgtttctcagatctgagaatcaggatttttaattttctttttcagggaaaccgtctattcttaaacatatttctttatctatatgaaggaaatgaagttctaatgttaggaactttagaagaattatctaacaatatattttatgattgaaagtaatgattttggcaactgtcttcaaatgaaaagggagtcagtagatttttttttttaaactccattagtctttttatatagcagcccatttagagaactgaattagaaaagttgaaccctattggttaaaaagtcagtgtttgaggaagatgtttactgcgtttttagtagtgtaatcaggttctttcattctccacttaaagattcttatggtggcaatatttttaattatttcagaattatttttggaagcttaattgcagggtaaggttgcatttcttaaaaatattttaaatgcatttcagtgaaatgtatttaatttttctaacataaaataatttgtagacgtaaaaaaatctgaaagtaaaccctatgtagttggtgatattcaactttttccctataaaagtggcaattttatgtgtttcaacctaatattaaaaaccctgataaatgcaaacaatgttttctttactgttttgctgaaaatagactaaactgtactttcaagttccctggtttatttctcttaaaatatttactctgagaatatttgtgttttatagactgagtagaaattttttttgtaatgataattattaatcgttaaaatttattgagcgtttatataaggcaatattcttagtgttttacrtattttaattacatattttaattaacttaatccttgtaacattactgtgtgaaaggaactagtcctgtcattttacagataagaaaattaaaccacagagcaattaagtcaaggttcacaattaattcatccaagggcacacgaaggaaattaaggaaaaatggactgctaatacattttattattttttgaaagattgtacatgttgctgtaagtgtataataatgcaaatattgacagaattctaatcagagctattccgtaccataaatactgttgagctctaccacatacctagtgctgtaaatagttagatgttgtcaggaggcttcgtgagagatttgggaaagagagtggtaaaaaaagttaattgtctagcagatgataaaaaaaaatttgttttttcatattgacatataggtatatacacacagacatgttaaagtatacattattttattgagacttcttttactgttcaaggttgactttgattgattgattctgcaaatattagtaaatgcctgtcatgtttggcttaatccctcaagcaagagcatgggtggtgccatgttgaggccttaagggtctctctctgtagggaacaaattgggaagtcagagctgatagaaacctagctttgaagcaaaagtaataaaggtgctgatgagttgaagatttatttaggaacctgtctttcttgtccactgctttgacaaacatgtacactggggttataataccttggtaacccttgactgatactatggccctccttctgctagatgccaaatatacaaaaatgagtaactcattaccccaggtcccaagtcagcttcagaaacagtagagaaaaatacaaccatgataatattaaataatmcagtaatagttgttataataggtgatgtacaatgtgctatgctatgctatggaagtacaaagaagagaatgttaattttgcgttgaagaatatcaaggccaagcatggtggcccatgcctataatcctagcactttggcatgctgaggcaggaagattgcttgaggccaggagtttgagaccagcttgggcaatgtaataagattctgtctctaccaaaaaaaaaaaaaaaaaaaaaaaaaaaattagccaggcatggtgtcttgttcctgtagtcctagctattcaggaggctgaggcaggaggatcatttgtgacaaggagtttggggctgcagtgagttatgatcatgttacaggaaagggtcccaatccagacccccaagagaaggttcttggatcttgtgcggcaaggaattcagggcaagtccatagagtaaagtgaaaacaagtttgttaggaaagtgaaggaataaaagaaaggctactccatagccagagtagccccaagggctgctggttgtccatttttatggttattttttgattatatgctaaacaatgagtggattattcatgcgtccccttttcagaccgtataaggtcacttcctgacgttgccttggaatttgtaaactggtaggagtgtagcagtgaggacaaccagaggtcattctagtggccattttggttttgatgggttttagctagcttcttcactgcatcctgttttatcagcaaggtctttatgacctgtatcttgtgctgacctcctatctcatcctgtgactaagaatgccttaacctcttaggaatgcagcccagtaggtctcagcctcactttacccagcccctattcaagatggagttgctctggttcacacgcctctgacagtcatgccactgcactccagcctgggtgacagagctagaccctgtctctaaagataagaaataataaaaaatatatatatattaatcaaactcatatataaaaggttttggtgggataaaggactttagaccacagagcaatggctcttctgtctgttatgttttatttgcttacattcattcattttgatgatgctggtagtctcaaaaattaatggattttcaaaagatgttggccttttattgttgacatatttctaggaaacaaagtcttaatatcattattaattattcttaatttaaaaagacatttatgtctcttgattaattacaagcttacttttttcaaaaataatttgagacaagatgcagacattcatacagtattttatatatagtacatgaaagaaaaataatcaaggtgaagatgtaaaaaaggaaaaaaaactttctctactctctgatgcttaatggtaggtcccaggaatcaaactgataaaaggctggttaacaggagaaaaaaacaaacaaacccagatttaatctataggcacagatttcacaaagaaatgcaactcatggaggtagttagaattgaggcttatataccatcttcacaaagggaaataaagtatagagaagagggtagacaaaggaagaggggtttgggatttgagaaagtgactcagaaatgcatggtaaataagaattacttagtaagtttgttatgtagataagagtcattttcctcttcctagtgtaggagaggataatttccaaatggaatttatcaaatggaaattcctttcatctttacagagggagatttatgttctgcttagacagaaatggagagagaagagagctaattgccttcactcaaaatccttatgtcaaagtgggatattttgagatggcatattctgattttcttcagggagaaaggaaacagaataagatttgaggttagtaatattaatatttttttagttggactataaatttggttgtatacttcttataggccagggcaaagaagtaaatctaactgcttcaaattatttttataatgaggcagcttattaagaaattaatttctagatacttaaacgtggaaaaaatatcaatttaaagctttataatgtttgtacaatctgttgtctagatgaactatggagactatggtatagaaatttatttggtatgaggatctgagatctctgatctgatcttatgtctgttgttatgggtttgctttattgttctttttggtgttaatctctgaactgggaagtctctgtagctttttgtcccccacctttttttgtgtgagggaggtacactgaagaatgaagaggttcataaacttagaaaggagagctttatttatcataagggttatagcctgcagggtgaccactgtgacaggctgggaagcatagccttttgtgagaagcttgaaacagatactttgagggaggggcaaagggaacagaaatttatactgagcagagtggccaaatatacatattcagtaagctgtgggaggagttatgaatatttatgaaaggagaaccgtgtgtatgtgcattaaacttcattccccttcaagccccttcatgggtcccacatataaaaaatggcaatgctagcatcatctgagggtcatgatccgagggtggagtttttggccctctgatgtcaaaggtggagcagaggacacgaaaacccttactgcttattcttggtagactggccagaaccacttcatggttggttatcaggcaaatggtctcttatcaggcaaaaaagaaggggtagtgtcaggtagttggttgatatcagttgtggaatcttttgaaagggctggtttttgttaagtccctagggaagaaagcctaatcatggttaagggggtggggtataatgaggttgtctgaccctaagtcctatcatggctgagaactcagttttcaaggttactctggggtccccttggccaagagatggtctcttcagtcagttgaagggctttgaagattatttttagtctatagtaaacatctaaggaaatgaaattttaagtttaaaattgcagcttcagtaggctttgggaggtctgtgaaccccttcaaattacatataaaattgtgtatgtgtatatacatatgtacacatgtgtttgctgaataatgaaaatgcatagtttttcgcagattttcaaaaaggattcctaatggaaaaaaaagaaaaaagggcttaaaagcactggtgtagagtatcaaggggtatggagagattatcttctttacttaaaggctaacttgagaagttctaatgtcaggtactagacttttcaaaattgatttgacctgtacctagtgttgcaccatgtcatatatttaccaattaggagacccacagtcagggccactgtgtagggttttgcctcactgcataaaagcttctggataatggagtaagtgggagctgaaatctgattctctaatttattctagggggaggggtgctttttctaatttgcttaaagagaactgtgaagactagtggtaactatatctaatagtagactatagatagctccagccatttgctgaaagcccagaaaataactttcagtgagttaatttttgttcaaaaaataattttttgccaaagatttttatttgttacctggctttagtgacattaattagatgttgaaaaattacrgggatcatttggagctttttacatcaccaagcaattaatagatattttcaatccctgtatacttcaacagcccttacccttaatccagctacagattctaaagaatttccagttgtaagtttatcctatttccaaaaccattctttggttgacagtacagtagatgctgagtattaaccatgggtggtgaacatctgtaaatttggcagaggcctgtctttccacactctttccaccaagagccctttgtttattcccactgtatctggaagcctctttggagcttcactttatgtatttggggttttttcctctgttcctaggcctccttttctcaattgacaaaatagttctaaagctccttcttttccttcctctacctaaacgggcctctataaacaccgaattaggaactgcgttatagcatgattctctttggggagtattcttccttattttccctgtgaaccttctttttgattatcaaagtcgggtgggaactgatccgcttagaaactgtaatcrttctactgattgttgttctctgaggccagttcaacagcatggttagtcccgttagccctgtccactatattgctgtttactctgcttccctgacctgccctgctactcctgtatttcagcagccctctctgctagggtaacataggtcatgaatatgtgtaaagtttatatattctaagtctagttgtctgaaatgaaaatatggattgtcattaggctagggaatttgattatcttgtttttattggcaatgtttagcattctgaaaagttgtgtgtataaggaataatttaccgttagagtaattgcttatgtaaaagtctgtttgttccaaaacattctagtcatttcagttgcatctactttgaaaaatttgaagtttctgatgaacagtctccttagtgaaagtatttctcaatatgaacacatatttttcaatggtgtaataccacatgactttgatttgtgtctcctcaaagaattttgattttgattctacttttcctcttttattctgttcttgctatgcagatatcttgctattgttagtcatgccccctcccaccctgcatgttattgttaagtcagtaacaattgacttcttacttggagtcacatactcttgttacatgtggtctgttttagtaacattatgttttcacatgttatgttagctcagaagtctagctttcactgttttctatagatcattcgaaactaatcaaagatgataatattttcttgctaactcagcaggatgaagtttttaatctcaggaatggcaaacattttattagagtttcagaattttttttctaataggagaaaaatatctttaggagaaaaaaagccagtaaagcctgaaaatactatgttaacaaattttatcttttcttgtgagcttgaaatctcagctgtgtttagaagcagagtgaagatggtaaatggtagtgcatccttttttatttggtattgattatccagaaatctttcaatgattgctggtgaaatcaagaataaaaattattttatttgaaattaaagtagagaataatagaattatatggaactacaagataatttattctgtatctctagcatataaattttaatctgtattagtttcatamgagaaacagaacaaattatatatataattatataagttatttatgtaagttatatgaatatataaaaaagaattgctgggaattggtttgcatgattgtggggtgctgctaggcaagtttgaaatccatgaggcaggtcttcaagaaggacaagctgaactcttgggcagaagctcaagctgtcatccacagttggaatttattgttcttcatggaagcttcaattctgctcatatttatttattatttatttatttatttttcagagacaggagtctcactatattgcccaagctggtcttgaactcctggcttaaagtgatcctcccgtctcagcctctcatgtagctgggattataggtgtgagccagtgtacttggctttcaattctgctcttaaaggctattaaactgattgaatcaggattaccctgattatctaggataatttcccttaaagtaaactgattatagactttactcatttacaaaataatttcacagcaacatctagattagtatttgattgaatgactggattctatattctagctaagctgactcataaaactgaccatcacagtgttctggtaccaatactattctttaagcataatgtttttctttgttggttttgaactgtataaacacttattgaaatatcatattttaaaggtgatgagctagtctcgatttttactgttaataacaaaagtgatgcagtaaatatattgtaataaccctttatattattttaagacattcatgattcacctctttctctaaatttaaacaaaaaaaccactactttaaaaaactttattttacttccccctactccttattcaactcctttattcttgcttaaatgtgtgttctcttcagtttcttagtgttaactttgtattagcctgttttcacactgctgataaagacatacccaaaactaggtaatttgtacaggaaaaacgtttaatggacttacagttccacgtggctggtggggcctcacattcatggtggaaggcaaggaggagcaagtcacgtcttacatggatagcagcaggccaaaaaaagagaacttgtgcaaggaaactcccccttatagaaccatcagatctcatgagacttattaattatcacaagaacagcatgggaaagacctcccctgtgattcaattacctcccactgggtccctcccacaacacgtgagaattcaagatgagatttgggtgggaacacagccaagccctgtcaaacctaaaacacacagttcaggctagagacgctacatcatacttttgcttcctcaaatctttgttagaagtaagactatttcacaattattgtatattctactctttaaagttcatcttagcatcacattattttttataaataatgctactacattgatgatttatatttggcacattatgattcctaaatgctttattctgtgaaactatattgtttttataacatgttatttttaaacagtggtccagagatttcagaatgaagactctctaaagatttctttaaaaaaatggttcatattggaaatattgttttggtatacactccattatctctgggagaaactttgatgttctgctgaggattatggctcagcagtattaaaactatgcttaatagttccatagaatcttgaagctttggcaaacacttgtttatgatgttttgaaggggtttccagaaacctgaaaaattttagttgtgccagatactttggaaatctcttatagatatgaagaattatgaatatccaatttaaaatggttaattaatggaatatgcacattttaataaattattttgtttttgttttacatgaaagtcagtgctactgagttatactgagtttataacgtgggcatgtaattttctacacaggacagggctctgttcagtgactgtggtcatatgagattcttcatttctaatggccacatcatgcctttgctaaagttaattcatctaacagttatctttatattacatgcctatatgttgtaggtgacattctagacacctgtgatgcagtacacctgtgtgcactaggctcctgtgatgtactactgtgatgcacctgtgtgcaactactgatgcactgctaggcacctgtgatgagacccacctcattcctgccatcataaaatatattatctgataggaaaaaagatatcacagtaggccccccttttcctcaggggatatgttccaagaaggcccccagcacccccagtggatgtctaaaactgaggattgtaccgaatctgattcttatcagtcagaacgtgtttcttctgtttatgtcttctactcacaaatttaatgccttttccatcttaactagacacttctcttgcaatgtggtcataattttgtagtttgaggcgtgagagcaaaactggtatgattttcttttttcttcacaatttcacgaatagaaaatttcttaccatgtatcttaacaactggttttttttctttccttatcaagtcgagaactttcaccttttcacttgaaggaagcacttttcgtcttcttttttttgttgttgtttttgagacagtcttgctctgttgcccaggctggagtgcagtggcaggatctcggctcactacaagctctgcctcccgggttcatgccattctcctgcctcagccatcgagtagctgggactacaggcacctgccaccacgcctggctaatttttttttttttttcatatttttagtagagacaaggtttcactgtgttagccagggtggtctcctgacctcgtgatccgcctgcctcccaaagtgctgggattacaggcgtgagctaccgtgcccggccacgtcttctttttggcatatattaattgctggtgagagatttcactgtgctactcagaatggcatgcaatttaaaacttaggaattttttatttctagaatattccatttaaaatgtttggaaactgcagaaagtaaaaccatggataaggtggagttactgatgatgctggctggaccaaaataagaatgcatacaaattattagagttgaaacaagtgctacaaaacaaaattaaaatgtagaatagagtatgttgtaggacagcaaatcgatgttggggggatgagagaagtgtcccttgaggaagtcacatttaactgagccctgaataatgagtaataataaaagctaacaatcagctattgcttgttatgtgccacacactattctaggcctttattatatattaactcatttcaacctcacaacaaccctgtgaggcaggtggctattcttctcttcatcttacagaaaaaatctggcatagagaggttagaaaatttccctgaggtcacatagttaattagtagcaaaactgggatttggatcccagacaaaatagtctatactcttaaccactatgtgggaaagatcatttcaggcaataagaacccatgtgtaagtgtcctaaggcaggaggccagaaggaagatcagtgtgatggaagttggtaaactaagataaaataatatagatgaagctagagagggagtttcatattcagacttcttatgattttatcagttgggctttagtgtgaaaatatgttggaaagaaataggaattaatgtgagaagatcagttaaaagattgttgtagttatctaatgagatgatgctggctgggcccagattgtggcagatggagcaaactatatagattctagaaatgtttgagaagtaaaaataacaggactctgtttatttggatttgagaaggggagattactgtttagttgctagctagagcagttgactggatagtgatatcatttactgaaacagtattaaaggggacagactttaacagtaaattataagttgaagtttggttgagtttcaggtgacttttatattaaagcctataatataggctatagaagcctgcagttcagaagagagttttgggcttgcaataaaatctcagagtttttcagccttgggaatagatgagaaaacagtaaaaaagacccagaatcaaaggtggaggaactggtagcatttcaatttgggtagaagaggtaaagatttacagaggatactgaggggagggagccagataaatgtaaggaaaatggacaaaacgtggtaagatgaaaagcaaaggaatgcagcttcttcttttggttttctgataatgttgcctgcttttttcttctggaatttcactgttgtactaaattgcttggagcttacctttgcatacgcttttctttgttaagtaagtaacttgaccttttattgcatggtttccttttctttttctttttttctcattaagtgttcttttaaagttaattttctttaaattcctgttaaatattcctgctcacctctctctctagcttcatcatttgctatttcattttattccttttcctctacaattggaatcttttatctgaaaatgataatattcacttatagcatttttaatttttgtgtttcagatcattctgtataatcccatttcactagacagagtaaacttagataagatccaagataatactttgctcctgcacttgacatgtctgcctgaacacaattgtccatctctacttccccattcaagaccatgccttaatccaatcattactgaactattttatatactagatttcttactctgaacttcctctttcctatcttcttctgtctcttttttctaccttggctactttttcattttcaccaaaccttcattttacagttatcattattcgcagtttctttgcacctttaccttatctagtctcagtctttgtgttttgtgttaaacttattctttattttacttagaatctgttttgcatagatactgacaacactccaacttcttttgaaccaaactcctcaaataaccttgtcaaatccccaaaagcttgtaaagccagttgtacttttcttttattcctcttagattcattatcaagcatcatgttagtgacttggaataatggatgaggcaaaaaaaagtataggctggcccttagaactgtgccatcttgatcagttgatctgttggaaaataaaaatgacatcattaatgttgatcatgtctaccactgttttataatatttaatctcaactgttgttcagttgacccttgaacaacatgggtttggactgcacacatccacttaaatatgcatttttttcccaatgaatttatattggaaaattctttggagatttttgacaatttgaaaaaactcatagatgaaccatgtagcctagaaatataggaaaaaataagaaaaaaaggtatgtcatgaatccataaaataaatgtagatactgttctgtttatgtgttgtcaataaggcttcaagtcaagagtaggcaaattagtagttaagttttgggacagtcaaaagttataggtgatttttgaccatttagggggttggcacctttaagaaccccctgcgttgttcaagggttaacaataattctaggttgaatttctttctctatagttatgattcagatcatttctactttttttcaagtttctgaatgcaatttcaaaggtctgtgtttaaaaccagagtgtcaagcaatctgtacctagctccttttcccttctttcaaaattctttatatattcatctaatcttttacttctttctttcaatgtgtgtcagaagaagggtgagttatttttttccccaaggacagtctttccacctatttttcctgacgtatgtaagaaaaactctagaggaagaaaaatacaagagaaaaaaatagttattgttttattagatgtttattatcctatatacttggtaataatgtagttaatatagagtttgaaaggctcttttaaaatattgttatgggtgttatatattaatatcatcagtggagagtattattttgtttttaacatgttgtattgataaaatataacatgggtttgctttgtttttctcagaacgactagtggtcgtggctgaacattgtgaacgtagtctggaagacttgcttcgagaaaggaaacctgtgaggtactgtatagtatcagaacaattaaatgaaaagcagaacttggcaaacaaaaaggcattttgtttaaactgcaggggtttggtttcttttgttacttgtttaatgataaaggtaggtgcaaattttcacttgagaaaatttaatttacagattacatatgaattcaacattaacatagtccagtgttcatcttttgtgaggtaggcattctctgaaatatttcacaaaaaattcttcaaaaggggatatatgaaaatttgaaaccttcttagtactaagcatttcactagctgagattaagattattttcctggccaggcgtggtggctcacgcctgtaatgccagcactttgggaggccgaggcgggcggatcacaaggtcaggagatcgagaccatcctggctaacacggtgaaaccctgtctctactaaaaatacaaaaaattagctggacgtggtggtgggcacctgtagtcccagctactcaggaggctgagaaaggagaatggcgtgaacccaggaggcggagcttacggtgagccgagattgcaccaccgcactcctgcctgggtgacagagcgagactccatgtcaaaaaaaaaaaaaagattattttcctgtatttttagtataagagtggggcttcactatgttggccaggctggtctcaaactcctggccttgtgatccacccgcctcaccctcccaaagtggtgggattacaggcttgagccaccacagtgggcatggtggtgcgtgcctgtaatcccagctacccaggatgctgaggcaggagaattgcttgaacccgcggggcggaggttgtggtgagccgcgatgcgccactgcactccagcctgggcaaaagagcgcgactccatctcaaaaaaaaaaaagattattttcctgaaaggatcacattgtaacttcaaataggatacttgtattcctagggacacagtgaactgtgttaaataaaggtcacattaaagagtagggagaaatattaatcatagcttggatagaatttaatgatacagtttaaatgcaattatttcaaagactcaataaatttactctcttggcaaggaaagtatgtggtctaaacttttattagaaatatactattaaatgaacttcttcacagatttcccgaagtgaccttaaaattatcaaaaatctttcttaatgtataaatcaagttgtattaaaccaataaaacatcttgccacgagtgtttatagatttataattatccatcctagttttgaaaaatattgttactctgactggttaataattttccattaccacaatattctagatgaaaaatctttttcaagggaagaaaagcatttatcttaataaatggtagtaatttgatagaagcaaaacaaataaattgaataaaagtgctattattgctcctttaaatgatttggttttgggtagcctctagaatgaaaaatgcagatatcatgtatataccagcagtccccaaactttttggcaccagggactagttttgtggaagacaggttttccatggatggagggtggagggatgattttgggatgatacaagcgcattacatttactgtgtrctttatttctatttttattatattgtaatatataatgaagtaattatataactcmccataatgtagagtcagtgggatccctgagcttgctttcctgcaactagaaggttctatgtggggatgatgggagacagtgacacccaaagtctgttgcttatgttcattctgctctgtaatctcgttttggttgctgtcactgcagaaaaccctgcttcacaaagataggatgttggaaatggaagcaggctgaaaaggagtgattttgtgccaatcttgggatattctgtcttgactttaatctagaatgtatggagatttgatattgtctagttgatcctcttctagcacagatgaagtcaattcacctggtttattcacaaatgggttgcggatctattccttcccattcaggggtcctttgtggttgggaagtaatgcttaaactcttttgaaagctgagataggtgatctgcrccagttgggagaaagaaggccctggctcagcctctttcaaaatctctgctaatgtttgaaacatgtcagaaatcccagtgttcacttgccacccccataattccagtttggctttgaatgcagccactttatctgcgaacttgaacagagttgttctctcctgaagtgacagattgagtttgttgagcaggttgaatatgtcacataaggaagcaagctttgtgacctattctgtgtcactgaaatgtgctgccagtggtgactatttttctaaaagaaatctctggaacagctctcataactcaaaactctggccagtgatccacctttagaaagccacctacttctgtgtttaagagaagacgtgtatgctctgtgtccatctcctcacagagctgcatgaacagatatgagttaagggcatgtacttttttttttttttttgagatggagtcttgctctgtcgcccaggctggagtgcagtggcgtgatcttggctcactgcaagctcctcctcccgggttcatgccattctcctgcctcagccttttgagtagctgggactacaggcgcccaccaccatgccttgctaatttttttatttttaatagagacagggtttcaccgtgttagccaggatgatctcgatctcctgacctcatgatccacscacctcagcctcccaaagtgctgggattacaagtgtcagccaccgcgcccagccaagggcatatactttaatgaggttgataattttaatcatatcctgcaaaacgttgttaagttcaggtgacatttttcaggtagccggcatttctgtatggatggcacagtgcatagactcacatttagaagcaacctttttgacctgagaagtgaaaccagaaagccgtccagtcatggtggccgctgtgtctgcatataccgatgtaaagtgaccaattcagtttctctgatatttaatcattcaaagacttgaatagttctgcagctttggtgtttattagcaacaaaagtgcacataaatatcctcatgcatatcctcctgaaaaatatattgcacaaaagcaagcattgttgcattgttgtcaacatcggtcaactcatcagtctgaattgtgtaccatggtgactcattgattctagcaattgtgcctcaatatcctctgttatttcatcagtttgtctagttatggtgctagtcraaagaggaacacgtgctaccttttgatcggcatcctctcctaaaatttcatgacagatgtctttagcagcaggcaggatcaaatcttcaccgatagtaaagggcttcttagctttagctatgtagttagtcgctaagaatgatgctcttagtgtcaacacgtttgatgaagtggtggctttcagtaattacttcagttcttcgtgttcatgtttttttcttttgaaaaactgcgaagacttgtcttttaatcagtctgcttggtctccatgtgacaaagcagttttgaaggttttatggcttcattggatagctggtcgccacatagcatacaaagcatacttggagaatgtgaatcatctgttacaatgaacctataatttaagtaggactgttggtattttcttttaaatgaagctttctttttgttggcagtcttagagtcttctgctgtctcatcatggggtctttccccctttttaaagaaggtctccagtgatgtttggtttttactcattgtgactaggggttagcttgtaggcttatcaaaactgtgaccaagacaagtgtgcagtgtgggaaggaggtgcagatggaagaggtaaataaaataataggcaggccacgtgcagactaaaataaatgttgcattttgacttaaagcctgccaccagatgcagctgtacacttgaagtacatcaactcacttgccactcaaaagcctaccaccagatacagcttaattgtcacttgcctctcactgatagggttttgatgagtctgcaagtaattgatttattatggtctctgtgcagtcaaacctctctattaatgttaatctgtatatgcagccactccccagcgctagcatcactgcctcagctccacctcagatgatcaggcgttagattcttataaggagcccgcaaccctgatcactcgcatgcatggttcacagtagggttcgtgctcctatgagaatcagtgctgctgctgatctgacaggaggcagagagctcaggtggtaatgtagcgatggggagcaactgtaaatacagatggagctttgctggcttgcctgctgcacacctcttgctgcgcagtcctaggtacagggtccaggactagtccatggtgggggggttgggaacccctgttgtacactatagccttacatccttccttagaaaagtctaatctgactataggtaagaaaaataacttttatatgtatttagaaatagtttaaccttatttagtaaatgtgtttttatagttataatttttgtaatgtcactaatctttgatttttatttaaaagaatatattattccggccgggtgtggtggctcatgcctgtaatcccagcactttgggaggccaaggtgggcggatcacgaggtcaggagatcragaccatctggctaacatggtgaaaccctgtctctactaaaaatacaaaaaattaaccaggcgtggtggcaggcgcctgtagtcccagctacccaggaggctgaggcaggagaatggcgtgaacccgggaggcggagattgcagtgagccgagatcacgccactgcactccagcctgggcaacagagtgaaactccatctctaaataaataaataaataaaataatatattattccttgctcactagttcaaatttacagtctcctgctgctaaaaagcaattttctttaaaagctagttgacattaaaattgaaaaccaattatgcccacaactttaggtaagaaaaaatattttagttgagcctgggttaaatttgtgtaaagatttacaatgcaatatgtatgatgaaaatatgcatttacaatgcaatatgtgtgatgcaatatgccctaactagttaggcatccttggacaagtctcttaatcattttccttatctgtaaaacaaggagttttactgattgagagatcattgtagcacaagttattcttaacttaatgttttatttaatatgcatcatatctgataatacatcaatcgtctttttttttttcttttttttttttgagacagagtctcgctctgtcacccaggctggagtgcagtggcatgatctcggctcactgcaacctctgcctcccgggttcaagtgattcttctgtctcagcctcctgagcagctgggactacaggcatgcccaccatgcctgggtaatttttgtatttttagtagagatggggtttcaccatattggccaggctggtctcgaactcctgacctcatgatctgcccgcctcagcctctcaaagtgctgggattacaggcatgagccaccgcgcctggctgatcaattgtcttcataaatataatttgttatatttttatagactaatatgttaacctactattgctctttgtttaaatggtagatttcttgacagaagaacctatggcaagtctacatttaaaatttcaatgctataaaaaaggctaaattattaatagaaacatctattttatgatccagcaattccagtcctagttataaggcctccttaaattttgtactgtagtacttcatttgcctcactctagtcccagctctgtctaggtatttatccaagagaacagaaaaatacatgtccacctatgcaaaaagatttgcactagaatattcccagaaacattcttcattatagctctaaactgggtagaactcaaatgtccatggacaggagaatgcataaacatggtacagattgataattctttatccataatgtttgggaccagaagtgtttcggatttgggatttgtttttcccagattttggagtatttgcatttacatagtgagctatgttgtagatgggacttaagtgtaaacacgaacttcatttatgtttgaatgatagcttatacacatagcctgggtgtaattttatgtaatactttaaataattttgtgcatgaagcaaagtttacactaaatacttatgtgtggaattttctacttgtggtatcatattgttgcccaaaaaattttggattttggaacattttggattgcagattttcagattagggatgctcaacctgttaatcaacaatgaaaaagaaagagctactggtacccacaacatgtggattaaccttataaatattacgctgagcaaaagaagccagacatagaagattatcggtatttatcttcggtgatagaaaaacagtgctttattctgttagagagtaaggggtaattcaagaactgattcaaaatggccttgagggaactttttaaggggatgaacatttttgtatcttgatcagatattacctatatggtgtatgtgtgtcataactaaatgaaatatgcactgaaaatgtataatatatgcattttacctatgtaaattataccttaatttaatttttttttttgagacggagtctcgctttgtcgccccggctggagtgcggtggtacgatctcagctcactgcaagcttcacctcccaggttcaagtgattctcctgtctcagcctcctgagtagctgggactacaggcatacaccgccatgcctggctaattttttgtattttagtacagacagggttgcaccgtgttgcccaggctggtcgcgaactcctgagctcaggcagtctgcctgcctcggcctcccagagttctgggattgcataccttaattttttttttttttttttttaagaaagggttgttgagttattcacttggcttgagttctcaatccctcatagagaaacagtattgtgttgttaatgaagatgtttgagccactgacttttttaattttttggtttttagaagaaagagtatgaattagttattgcttaacaagttacctcaacactttgtggcttaaaacaacaataaaaatttattaactcatataattcctttggatcagaacataggaatagcataactagatggttctagctcaaggtctcacaagatttcagtcaagataacagctggacctccagtcatctgttataaaagcttttctggagttgggtgatctgtttctaagatggtttacttataaagaaggtgctagttgttgacaagaggcttaattcttttctacattgagggcctttccacaggcctcttgacatgctcaaagcatggtggttggcttctctcagagtgaacaatctaaggaaagaaaacaaggtggaagctacagtggctttggtaacctagtgtcaacaaacacacactgttattcctgcaatgcaatatcctgttagtttacacaggtcagccattaactgtattctgtgttggagaggattgctcaagaatgcacatgtgaatttcatgagtcatggctcattgggggccatcctggaggctgactaccacaaatgtcttagagaccatacaaatacttttgaaaaaacactcctacaaaacaggagtgacatgctaaatcaatattaatgctaactgaaaaatatctggaattcttaaaattattcatatttgtttaaagtatttggggtagaaaaaasaaaggattatacactaagaatagggggtagagtattaagggaatatccagaagtcccacaggtgaaatagggtctttatggacatagctatgatcagaattgctatacatcctgaaaattgatgttatccatggtcttgtgctcccaaaagttccagaacaccccgaagttccagaggaccccataagccacaaagagagcagtcctctggtcatcagtatggtagtctcttatctccacatttccccctctgcctgtatatggtccttcttttacttggtaaaggaactgaggcgaaagaagttggtgattcaaaagataaatttccgttttcattgttttacctcaactctattccacccccacccctcctgcctttttgtttttttgagacaggttctcgctttgtcacccaggctgctggagtgcagtagtgcgatcactgcttactgtgatcgctgcttactgtagccttgacctcgcttactgtgatcgctgcttactgtagccttgacctcctgggctcaagcgatccttccacctcaaccaccctagtacctgggaccacaggtgtgcatcaccatacatggctatttttttattttttgtatatacaggggtctcattatgttgcctaggctggtgttgaactcctaggcccgagtgatcttcttgccttagcctcccaggtgttgggattacaggcacaggcatgagccaccatcccccaaccttttttaaaaatgtttttgaactttgaattgtattatataaggatacaatcaatattgctttgccagtatgattaaatcattagctcatgaaaagttttgcatttctgtgcttaccattttttatctttgtttgaaagacgacaaatcttgtggcaatgaacatcagtggtttcttcaatgattttgcttttgtcttcatgaggataaaatagtgtagatggaagcacattctttgaggatgtatattaacatgagtaggattaaatgcaaaatttacatgatcttttatgccagttacattttcttttttcttttaaatagaacatatagtagccttaacaggtctttccattttttccattgagatgtatttaagcatttgtgtaaataaagtactatttttaaattattctgataatagactaaaagtcagtgttttctttgtacattttggaatataacattcagtacttactgccttttagtaggaatgatccttttaggttcagttccaagttgttatctgatccatccatctaaattaattttgctgagaactatttgacttttccacatatttggattacattagtctccagtaacagagcaggtatatgtgtagagttgatgtactgcaattttaatyaattttataacctgtttatagaaagtgagaagatgttcttaaggtttataaattagttctttcctttactaccaaaagtaagcacctgcacctgcaagaagggctgatgtaaacaggaaacctatttagatggggttgcaacttgacatttgtgatttttacttgttcctttgtctataactgttgcaaaaccataagctgccagttgtctggtcgtaatttgcagttgattttctaaacataagcatcattcaaagcatatatcttacttgatatatattttgaagaaaattttaaatatttggtaagaaatttaaatttaaattttaaattttaaatctttggtgggacagggatcaggggaatgaaaactaggaatttagagaagagtctgtgtcaatttgctgactttttttcatgaccgatttaatattgaatgaaacaatattgtactgaaatgtcatagtagtaatttgctactactatgggaataattacaatttaagcctatcgtgaagctccagatctcactagaaaatcaaacgttctctcttagtattaacggccgtaaaacccttttgagaatttatattataaaaggagaacataagtttgttttatgaggtgttatcaagttagtattttatagactaatgttatttgtgtggatagttggctaacctggtttaaaggaaaaaaaatattcaacattttctttacagtccattcaggctttaatataaggaattaattttgagacagctgctgtctttccagtggcttttatgttatctgtgccatagttcaatcttgccagcatttctcttcagtttaagttaaatgatcaaaattattttttgaaaatataaaattgtcaaattaaattcctatagtgattaggtttcaagaaaaaagtacagcatttagatttgtttgaagtcatctcacatttagtgcctattaatctacctaatgctaccctaaagcaagattcaagagactgagaagtggagaaatttagatctcaactcctctttgaaatgctttccagagaatatttaaaaaacagatatacctttatcactgctatcaaagcaggcatgaggaaattgtttttcttttaagtctaggtgctgtatgggaagtatttcccttttgtgttagaattattcagagcatgtacttttgcttaacctatgaaagtatcagcaaatgtagctcatggacagatattcagcagagttttggcacttgtaatagagtttctacattgtgttaagtttgcaggtgaatgcagggtgggcagtagagccatattcctttaacaaaatgtagtttgtcacgtttttagggttatggttttgaaaatttaccagaataccattagtattgcagaagttatacgtgaagactttgatgggaagcagactatgtctgcagctgtttactagcctgatggaaaacatgatctgacttactcaaattagtgagttttattttcccctgttaaaacattgcctactcactgaatgagatactcgaaagaatttggacacattctggaatgtggtccagagttgaataatgagctacaggttgtagtaatcagaaatagatgttagatattcttattttataatataaactgataatggatcttgaggctttcatatcttttttacttttgaggaccgtagtttcaaaatgcatttgaaattatggtagtgaagtcatgtgaattagagatttatataactgatctataattctcttcctgttttacatgttttgtttaaagaaggaaaataataccgaaagatgctctacatttagacttgttatcttgcaacaaacttttgctttctgcctctcttgtaccttatatcttactaattgccaagtgttgttaatacaaacttggcaatagttctcacatatctctgtcttatacattctttagtttaaatcttcactaacaaacagcttggctattgcattgtaacgttctaactggtcttcctggcttcagccatacttcagtcctcccactttttctgctatgttaatatttttgaagatcagtccattctctgttcagaaacacttggaggttctccatttctttttttttttcccccagaggaaaaggcatcttattagcataggatctgacttcaatctaattctctcattaaataactccaattactactactgcttctctaaatattactctctaactctcttattatttccaatgtgcctaaattgtacaattagttttaattattcctaatacacattgaggagagtgaatgccaaaattttgaaatttaccataaaaactgaaatgtctttttgctcaaccctgttatctccaatctttagtgcaatgtacagcacttcttcaagtaatacatcttactgtttcccttcgtactcttcttctcaaccaaagcaaaaattatattttcctcctccaaatgcctatattatactgtaaccctctartagtaagatatctttcccccttcaggcttataattgttagtctacagttatagaattaaggaaggaattgtttatcttctctagttaacgtttttgacatacatactgtaatttatttattgtctcctaaagttgtaagtataaaagtttccatttagtaaatatgtggcaaatggactattgaatgaatgaattatacttttaggttagtcatggagtttgaatatttccctattatctttttttttaatcatgtgctacaattttatttctcaaacaaatgaattttggtgaaagtatgatgcaaatatgaatttctttatgatattcctagaaatgttttttaaaaataaaatgatatggttagaggaaatgaactctcaatttcttttcttgtggctctggggaagaattcttctctaagctgataaaggttgttggcagaatttagttcctcgcaattaattttaggactgaggtatctgttttcttgattactgtgactgagtgctgctgtcagctcctagaggccatctacatttcttgtcatgtgtttctgtctcctgctgccctgtgaagagattccctctgccaagattgtatgtttcctgaggcctttccagccatgcagaattgtgaatcaatctaacttattttctttataaattacccagtcttggtatttgtagcaatgtgagaacagactaataaagggggtcaataaagaaatgaagaaggaaattgaaaaatttcttgaaacaataatggaatggataatgaaaacacaatataccaaaacctgtggaatacagccaaagcagtattaaaagggaagttaacagctataatcatctacatcaataaagttaaaaaaaatcaaagaatataatgatgcttattcaaaaactagaaaagcaagagcaaaccaatcccaaaattagtagaagaaaaaaaataataaagatcacagcagaaataaatgaaattgaaacaaatgaaataatagaaaatattagtgaaatgaaaagtttgttttgttaaaaaagataaagaagatttacaaacctttagatagactaagaaaaaaaagagaagactcaactaataaaatcagagatgagaaaggagacatcacaactgaaaccatagaaactcaaaggatcattagagacttctatgaacaactctatgccaataaattggaaaatctagaagaaatggataaattgctagacacatgcaacctaccaagattgaaccatgaaaaaaatccaaaacctgaacagacctataaccagtaatgagatggaagctgtaataaaaagtctcccagcaaagaaatgccctgggctagaggactttatagctgaattcckccaaacttttccagaaaagttagtgccaattgtactcaaactgttctgaaaaataaaggaggaaggaattcttctaagctcattctacgaggccaatattaccctgatacccaaaccagaaaaagacacatcaaagaaagaaaactacaggccaatatccctgaaaatcattgatgcaaaactcccccacagaatactagcaaacaatacattagaaagatcattcrtcatgatcaagtgagctttatcccagggatgcaaggatggttcaacatacgcaaatcaattaacatgatgcataatatcaacagaatgaaggacaaaaaccatatgatcctttcaattcatgctgaaaaagcctttgataaaattccacaacccttcatggtgaaaaacccttaacaaactagggatataagcaacataataaaagccatgtatgacaggcccacagctattaatagcattatactgaagggggaaaaactgaaagcctttttactaagatctggaacatggcaaggatacccactttcactactgttattcaacatagtaccagaagtcctagctagaacaattagataagagaaagaaatcaagggcatgcaaattggaaaggaaaaagttgaattatccttgttaacagataatatgatcttatatttggagaaaactaaagactacaccaaaaaaaaaaatgattagaagtgataaatgaattcagtaaagttgcatgatacaaaatcaaaagataaaaatcagtaacatttctatatgccaacagcaaacaagctgaaaaagaaatcaagaaaataattccatttataatagctacaaataaaataaaatacctaggaattaatcatgaagtgaaagatctctacaatgaaaactayaaaacactgatgaaataaagaggatacaaaaatggaaatatatttcatgtttatggatgggactaatcaatattgttaaaatgttcatactacccaaagcaatctacagattcaatgcattctctatcaaaataccaatgacattctttacagaaatagaaaaaacaatcctaaaacttatatggaaccacaaaagatccagaatagcaacagctgtcatgagcaaaaagaatgaaactggaggattcaaatttactgacttcaaattatactacagagcaacgaaaacagcttggtatttgcataaaaatagacacatatgctgatggaacacaatatagaaaccagaaacaaatccttacatttacaatgaattcatttttaccaaaggcgtcaagagcataaattgaggacaggaaagtcttttcagtaaatggtgctgtgaaactggatttctgtatgcagaagaatgaaactagacctctgtctctcaacataaacaaaaattcaaatcaaaatggattaaagacttaaatctgacctcaagctatgaaactactacaaggagacattgatgaaaactctctactaggacatcagtctgggcaaagatttcctgtgtaataccccacaagcataggcaaccaaaacagaactggacaaatggcatcacatcaagttaaaaagcttctgcacagcaaaggaaacaatttaaaaagtgaagagacactcacagattgggaataaatatttgtaaactgtctgacaaggggctaataactagattatataaggagctcaaataactttataggaaaaaatctaatattccaataaaaatgggcaaaagatttgagtagacacttctcacaagaagacatacacatggcacacaggcttatgaaaaggggctgaacatcatttatcatcagagaaatgcaaatcaaaactacactaagatatcatctcactccagttaaaatggctttaatccaaaagacagacaagaataaatgttggcaagggtgtggagaaaaggaaacccttttacgctattggtggaatgtaaattcgtataactgctatggagaacagtttggaggttcctcaacaaaactaaaaataaggctatcatatgatccagcagtcccactgctaggtatatacccaaaagaaaggaaatcagtatatcaaaaaggtatcttcactcccatatttgttgcagcactgttcacaatagccaagatttggaagcaacctaactgtccattaacagatgaatgggtaaagaaaatatggtacatatacacaatggagtactattcagccataagaaagaattagagcctgtcatttgcaaccacatagaataaactgaaggtcattttgttaaatgatataagccagggacagaaagacaaactttacatgttctcacctgtttattggaactcatggagatagagaggatggttaccagaggctggaaagggtagtggggctgtggggatgaaataggggtagtcaatcagtacaaaaacataattagaatgaataagatctggtatttaatagcacaacattgtgactatagtcaacaataatttattgtacatcttaaaattactgaaatagtataattggattgtttctaataccaataaaggataaatgcttgaggtaatggataacccatttatcctgatatgattattacacattgtatgcctttatcagaatatatcatgtaccacataaatatttgtatctattgtatatgcacaaaaattaaaattaaaaaaattttaaaaaatcatctgtgtgtaacctcagtgatgaatttttacaaggttcatttactgactatattttctgtattcaatcagttccttcagttagcgaggaaacttcagtaaattgactcaggtaggagattagtaattaggagttgccctgacttcaaaggaacattttgaattttattttgtggtattgtctatatccataaaaggtatagaaaaggtctatatccattaaattaactagtctaatttcctgttgggaattatctgaagagcagaaactactgagttaataaataataaagtgtgagggtagaaggattacaactaaataagcacttggaattaggctacaagagactcagaggttttttttgttgtttcattttattttgtcttttatcttttcttcttagctatattttattttttgggttattgcaatagagtttacattatgcatccttaaaatttatagtgttttatgagttgattatacccattcacatataagataggaatcttataatgacatacttctatttactcctctcatcttttgggtagttttgttatacattttatatttacttttacatatattatacatttcaccatrtatctgtactatttttggcattaaagtttctttaaagactttgagaaatgaagaaaaaattcttttccatttaattatgtatttgccatttcatgaactcttttttttttttttttttttttttttgagacagagtttcactctgttgcccaggatggagtgcagtggcacgatctgggctcactgcaacctctgcctcctgggttcaagcaattcttgtgcctcagcctcccgaatagctgggattacaggcacgcaccaccaggcctggctaattttttgtatttttagtagagatggggtttcgccatgttgcttggactggtctctaactcctgagttcaggcaatccacctgcctcggcctcccgaaatgctaggattacaggcatgaggtgccgcgcccagcccatgaactctttatttctttgttttgattcaagtttgatatcctgtcctttctgcctgaaaaacttcatttagttttgtacttttttagatcaagtcagatacttacaaattctcacagattttggtcatctgaaaatgccttcatattaccttatttactttttcttggctattattttatgaaaaaatgcaaatagtaaaattgaaataattatgcaatatacctagattttctaattaacattttaattaaaactaactttaactattttaacatttaattgtagctaaatttaacccatctttattattttgatgtatttcaaagtaattgctgatatgaggacacttcattcctaaatagtttagcatgtatacaactaactacatttcaatatgtgtttatgttttagttttaggttaaatttacatttggtgaagtacacaaactttttaagtttacatttgatgtgtttttacaaatgtatacacttttataaactaaatgcattaagactagattaccaccattatctgagaaattttcctcatgtcccttcccagtaaatctctgcacctcccctcctgcagtttccaagcaactacttttctgattttttaatcgtgggttagttttgtttattctagcactttatattattggagtcattcagtatatactgttttgtgtaagacttcttccttcattcagcataatttctgagggtcatccatgtggtttcatgtatcatagttcatttgtttttgttgctgagttgtattgtgttttataaatatatttgtttttcaattttctcttgttgaacttcttggctattttcagggttttggctattatgactaaagctgatataaatgccctgttaagtcttttttttgtggccttctgttttcatttttcatgaggaaatactttgagcagaattgttgtgttataggatattaatcatgtgtatgactaatattttatagaaacaccattagacctttttccaaaatgttataccttttacatattttcaccaacaatatataatttctccacatcctttccaggagttgatgcttttagtcttttacttttagccatttgtacaaggtataaagtagtatttcgttatagatttactttgcattcccatgatattcaaaggatattgagtatttttcatgtgcttattaggtattcatatcatcacatatgtatttgttcaattttttgtcattttaagtggattgtttctcattattgatttgtaggcattctttgtgtattctctatattctacatacatattgttagatttttttgcaaatattttctgcctctttggcttgccattttattttatttatttattttattttatttattttataatggagtctcactcttgcccaggctggagtgtgcctggaactgcaccgcctcctgggttcaagtgtttcttctacctcagcctcctgagtagctgggattacaggggccctccaccacggccggccaatttttgtttttagtagatatgtggtttcatcatgttggttggccaggttggtctcgaactcttgacctcaggtgatcaacccacctcagcctcccagagtgctgggattataggcgtgagccacactgcgcctggccaggcttgcctattttttaaagatatattttgatgagcagaagttattattattattgtatttagagataggctctcactgtgttacccaggctggtctcgaacttctgggttcaggcagtcctcctgcctcagcctcccaaatagctgggactacaagtgtgtgctactgcacccagcttaaaagttacagtttgtgatcaagtctaatgtgtcaaatttttcttctgtggttactgctttttatatcctgtttgagaaacctttgcctactccgaagtcatgaagatattcccatattttattctagaatcattatagttttcgattttatgttggctctatgattcatctcaatttaatatttgtatatagtgttgaggttactttttcccatactgatatccagttgccttacctctgatcgtttaaaagaattttcatttttgattgcattcctttggtgccattattgaaaattaaaaggccatataagtatagatctgtgtctgagctttttgtattatttcattgctctatttttctgttcctatgccagcatcataacatcttgatgattatagctttatagtaaatcttcaagtcagtaaatatagattttccaattttgttcttctgtttcaagattgctttagctatttttggttctttgtatttttatataaattttatagtaagtttctcaatttctaaaatttctgttggcatcttgattgaggttgcgttgcatgtatggatcaatttggaaagaactgatatcttaaaaatattgagtcttccactagattaacatgttatttctctccaaatttttaagtcttccttagtatctctcaacagtgttttatagtttatgatgtagagttcttgctttactttttaaaaattttttcctaagtagcttatgtttttgatatgattgtaggtaaaatttagttttattttccaattgtttgctgctaatatatagaaatatgtgaattttttatattgacactttctctgtaactttgctacattatatttacttattagttgaaatagttttttggtggattccttaggattttctacataaacaaccatatcattgttgaatagaaatgtttacaacttcttttttaacctttatggcttatatttcttgttcttgacctatttcactagataggacctccactacaatgctgaatacaaatattgaatggtcaatatttcctagttttttatctcagggaaaaatgttaagtatttcaccattatatacggtcttagctgtaaggtttttatatatgccttttatcagattgagttaggtactcttatatttctaattggctaagggtttttaaaatcagaagtatttaatgttgttaaatgtgtttttgaatctctattgagactatgatatgatttttcttctttaatgaatatgtaaattgctttgattttgaattctttttttgtgtgtatgtgtgacaggatcctgctctgtcatccaggtatgatcatagctcactgcaacctctaactcctgggctcaagcaatcctgcctcaccctcccaagtagctgggactacaggcacacaccaccacacctacatactttaaagctttttggtatagatgggctcttgctgtgttgcccaggcttgtcttgaattcctgggctcaagtgatcctctcaccttggcctcccacagcactgagattacaggcctgtgctaccatgctcagctgattttgaattcttaaaattgagatgtaattcacctgttaaaaattcatggttatgaaagggaaaattcagtggctcttaaagagccacttcacaagattgtacagccatcaccattgtctaattctagaacattttcatcactccaaaaaagaatgagcagtccctcgccttctctctccccacccctggaaaccactaatccacttacttcctgtatgaatttacctaccctgaccttttcatataaatggaattatacagtatatgactttttgtgcttagcttctttcacttagcataatgtttttaaggttcgtccatgttatagcatgtattagtacttcatttatttgtattgctaattttctactgtatgtctttaccatagtttgtttattcatttatgggttgatggacatttggattgtttctaccttttggctgttatgactaattttgccatgaacattcatatgtatttgattgaatacctgcttttagttcatattggaatggaaattttaggtcaaatggtaattctatgtttacctctttgacaagccatttccaaagatagccctaccacttactatcccactagcaatgcacaaaggttccatttacctcacatccttaccaacatttgttatttttcatcttttgattgtagacatcctagtgggtatgaagtagtatctcactgtagttttcatttgcatttccctaatataaacaataatgtattgttctttgtcccaagttcctggcccagagcttcaaaaacccttggaatttcctgagtaataggattgacttgttattcatgatggcttctttaagccatagctgagtattctgatgaggtgacacttgaaagcctctagcttcaggatgggggctatttcgaaagaccaaacatgtgatggaaagttggaacattttattagttttctatggctactgcaacaaattaggtagcttaaaataacagacgtttattctctctcagctctggaggccagaattcagaaaacttactgtgttggcagggtcacaccccctttggaggctttcaataaaaatccttctgttccttttccagtttctggtgcctgttggcattccttggcttctttggcttgtggccacatcacttcaatctttgcccctgtcttcacatcaccttctttgtgtgtcttctcgtctatgtgtctcccttttataagaacgctcgacattgaattttgagcctacctggataatccaggatgattttctcaaatgaaaacaccctttttccaaataaggtaacattcagaggtgccaggggtgaggatgtgcacaaatctttttgggggcctcctttcagacaagctaaccagcaaataaacaaaagatacatactctaaaaatattatttcaaatgcagaaaagattttctgttagatttcaattctacttgctgcccctataaacaaagttcattttctttagaaaagaggtcaggaaaaaaagttttattttgttgtttcaaagtcattgctgtgaggcatatatctcatatgatttgtataaaaatttattatgtctaagatttagatatcccagttaatatcagatcttttcaagaggaacttcatcttaagttgtattccttttacattttgttgttatagttacaattgtaaagccaagggttgaattttcatccatttatccagacccagtctttaatttagtcacaaagtttgtgacttaaaaatctgtatattacaaaaggtggatagacctattaaagggctatacttatagtagtggttgtggtatggttatctttatcattgctattattttaactgttactgtaggtaggtagaaataccaggttattcaatgggacctactagactattcagttaagtgaacccataattgggatttaaattttaaacttttaccctgtacttayccacgcgattggtttgctttgcttatattctattacatctttgctatatgcaaaatacccttaactgtagttaaaagttaaagaggccaggcgaggtgactcttgcttgtaatcccagcactgtgggaggccgacgtgggcagatcacgaggtcaggagattgagaccatcctggctaacacggygaaaccccatctctactaaaaatacaaaaaaaaaattagctgggtgtggtggcatgcgcctgtagtcccagccactcgagaggctgaggcaggagaatggcatgaacctgggagacggagcttgcagtgagccaagatcgcacctctgcactccagcctgggcgacagagcaagactctgtctcaaaaaaaaaaaaaaaaaaaaattaaataaacaatgactttggagctgagtaagcctagatattttcttagttgaaaaaaaaattgtcatcagcgtcaaaagaaattaagttgatgagttctttctatgaacttattcttggaagagaaaggatgatgggggctatacacacattaagaaacgtatgtagcacggaaagaaaccaatatttgagtacctactttataccaggctctataagcatgttatatttaaactttaccacatagctgtactggcggttattattacttcattttaaagattaagaaagatacttagaggttagatgacaattagaaaaagatagcccaggggtttaaactttgttctgtttaaatctaaaacctattatctttgttctatactataccttcctgtatacctgaaagtgaaacaggttcatttatattcgccttctacgacagcggttctcaaagtgtggttcatcatcattatcacctgggaacttattagaaatataaattcttgggactcatcttagatactatatcagaattgcagggagtagaacccagcagtatctatattaatgagcccttaaggtgattctgtaccattgcttttgatgaaaggttcttaaaattcttccattggtgggaaacctagaaatcaatgtgctctttgtagaacaatatgagatactgacttatacaacttaagaacagttgtttttttgttttgtttttttttttttttgggacaaagtcttgctctatcgcccagattggagtgcagtggcgcgatctcagctcactgcaacctctgcctcctgggttcaagcaattctcctgcctcagcctcccaagtagctgggattacaggctcccaccaccacacatggctaatttttgtatttttagtagagatggggttttgccatgttggttagtctggtctggaactcctgacctcaggtgatcctcctgccttggcctcccaaagtgctgggattacaggtgtgagccaccactgttaagaacagttttaaagtatttgagctaaattagctaccatcttatagattctggttgaaataagtgattgcagatattgcacaagaaaacaacacacacaggagaacctaaaattaagaatccatatttattaatattatattttttgtgaattggtaaaagataactattctccaatttttacacagtattcctgggtcattatgggattatatggataagagctttttcttactcttttttgtgaagcttgctgtaattggtatgatcttccttatatcatagtattgagaactgaaagtctagttcaaggttaggtgaaatagacagaactaactaattcaaggtgatctggtttagggaaaagtatttatttatataggtaagcagaactcagagttctacattaaaatttggagacaaagctttggctattaaagtattattttgctttgtctgccttcctatttatgaatcataggaagcttatggagtctagtagaagtagttaagaataaaatttggctatttttggattttctgatctaaatataatcactgtatcaccccaactgctgacaaatacaagggacgtggtaaatagggttttttcagcaatcatactggtcataagttacttaagacagaccaatacttatttaactgaacatttcagtttgacaaacttttgtttacaatatgctgtcttgcagatgctgtaataagcaatccatattattcaggccctctcccattcattatttgagatgggtagggtgataaattagtcatctaaaatattagtccacttaaaaatgtgaattggtctcaaatcaaaattctgaacagtaatagaaatttgtttctctttttttcacatggcaatatatacattaattttaatttaaaaaacaactttggaatgatgcagggtacagatttaacccactatatgccatgataagttctgtcttagagaaaagttgcagtcttccaacatcccaaatgctgccagggtatggggagttggacttattacctagtgtgtttgcacagccagaattagtgactatgatgacaaaagaggttttgaagtttctgtgcaaggataggaaaaaatgcttaggagaagaaaacattgatggggcagaaatatgcagccaatcttgagatcctccagacctgtgtatcaaatggtgattttattctcacagagaagttagaaaacggttcttctgattcagttatgtcaggagaatagttggagaactcaacttgcaatttttgttaatttataggatatatacatatgatataacaaaatatattgtatagtttcagaaaaaccctgggatttttgagggagacttggactttttgtttattttgttttgcttttaagatgattaagattctgtgcagggccgatagctcattgatctccatttagcttctgtttggtgttacattttttactttataaatttgcaaatggaggcagggtgaagttggaacactgtctaagcataacaaatcagtgacagagcctcctggctttatgtctgaacctcaaaccgctagactatgttttccatatgtatttgattttaccaagttaattttctgctgagaagaaaagttatctagtattcaagttggaaagttaatttcccaatttattgtctcctgttgagaattagacacattccagacttacagggttctattttgattattttggagttaaagctaaattgtaaaatatgcctagtctcacaactgaaagtcagatggactgattactttttttagacttactataaaacaatctttaggtagcagtttatcaatgcaatttccatttcaaaacatctgaatctgaggcaaatacattcttaaatttagcatggatagttgtgtcctttcaggctaaaacatgtgtgcccagtactgaaatgtgttatttcctttttcaattccagaaactgttgtatttttcatcctttttgctctgttaaatattgtggtatttttttacaaaacatcaaaatttagtaagtgataagtgtcaaattaaaagcctcaaagacactagctcatcattggaaacaccctccccaaattctggaattataaactaatgagtctttaaaagttatatactagctgagctcttttgtgttcaagttataaaggaaagtttctttgaagatagcacagaattattcacttgtaatattatctgaacawtaatcattagtaagcattttatttttcctctccatttcttaaattacacagtagctaaccattaatatatttcatctgtatttcctctctcttaacattttaattcaggctgataccaagtaaggaatgttttagaccaaaaggaaaatttctgtgggagtgatcaggttttataaggtgaaagaacatcttgaactcatagaatgcagaaatgtgtttcctcccttggttagctgacagtatgggtgttttggcttgtggagtggcccttagaaatatcatggatcatggatctgaggaaatagcatgtgtggttttagttatcacttatacatgaatgatttccaaatctatctcagcaaccttgacctctcattctctttcctggcccctatttcttgcaatttgagtaacatctcttcttggaaatgttgcagatacctaaaagagctgatggtttgaggccagtagtaatctctctcaacaatttagtctaatttacagttttagacagatattaacaagattatcctgttacccagtatatcctgatttattcctgtttctttcagtaaataaaagactagaagagttgtattttcagcaaatgaattttttttgtggatagccattgggtgaacttgagcatcttgtgttttcttgactaactaaaagattatacattctatcttgaggtgttattctattagtggtagagaatttaattatctttcccccttgtaccattgtgtgatattattttatatatgtattttaacacctatttttaatacatgcttattgaacatgcacattacagacactgatagatatacggagtcatagttgaataagctagtccatactcaagatacagtgggaaagacaagcttatatagaaataattaccataaaatctagaaaccctcaactgtgtactgtcggaaatcaagaaagggagttcaattctaccacaagggagagccattgaatgagaacccattaaggatctttgcaaaaaattattgaaatggcaaaccatatctgtcagartaaagaatgatgtcaaaaaggggccacttggctggggtaacagaggaggcttagagaacagggaccccaaggtcttgatgagcttaaagagtgggtcctcaggaatgaggaacagagaagtataggaggtagtagttaaaaatttggatgttttaagtaaatataggttgtgcagtgtctcattgtgacagactatctgtatttgggagtattggctggggttagatgaaaacctgtggctgtgaacatacgaagtcttccattctgcttaagaattaaatccatgatcttggcctcagtatgttttaaccaacaactagagatgatttatggacgatttaatcatgaagacagtaaattgcctttgaaatatatctggaaagggataaaaaaatatacttgggattataccaacctaatagatttgaaaatttattgagccatgttgaaaatccaaatacaaccaagttgactcatacctagaaactatcarcatcttttttggtgatggtggtggtggtgatagtgtttttctcttttagattttaagcttactttcccaagatttatgacttttgtaggtctcttttggtctcaccaatgttataagtaaatttttatgttttatttttctttgaagacaaaggaaaatgatgaataattcttatctgcttagttaattgcttatattataattatcagtttgtaaatctgtccttctaagtatactataggcttgtttgtagtgcagatcaattcttcttcttggtaattgtgggcccaaaaattcagtaacaaacaaatagccactcaattgatatgttttaatataagtaaaaatgtcctcaaatgtaatcttgctttattgggagttatcaattatattattttgaaarytaccttttggtcttatctgtatttataatcactagggattcttatgttcagttgttcaggacaatgatgacaaagtaaacgctagccacccaggccctgaagtaacaataattactgaaaaatgtcaaaaggagtagaatattttttgatttaaagtataattttacattttcttggttactgacgggtttgtctatttaacaagattctcacttgggaattgtgtaggataaagtcccattgtcccctgtcagtatcttttttatataactgtgtgaatctaattctcttaatcctaaatcttcttttagtgtccatgttcaattaaactgtaacatgttaactactactagacatatgatagttttactttgctgttgcattagctacttaaaaaatttcatgacccaagttattggtagtattaaagaatrtaacttaaaaagctagtaagtacataaaattctgcaaatactgatttgttcttctcatggtataaaatagcattttttgttcctctttataccttacattttaaaacaaattaaaaaatcaaattctgagaatatgaaaggacagaaaagcaaatcagattgtaattgacatgtactctcaagtaatagctaagaaacggtatgtcatttatgtttgaatttttaaaaattattttggtatgcatgttcatcagctcatttttaacatgaatgtgctttttgacatgcaagtctaatgtctaatagctcacaattagcaaaagcacagtatagagagtagaaaatgcagtctatgtgttcagtagtttcagaacttgttcaatgggaaaatcactttaaaggtttggctttaatttcatgagaaagacatctatattgaagtagtatgcagctgaggtcctctagtgtcatagctgaatatggcatcagttttttgtgagttgtgtgagaaacagacaagaacaagagaagctactctaaaattgacttgtagagccaaatgagttcataaaactaggtttacattttgctaatctcagggaatgtttctctttttttttaaggggaagactttgttttctttcatgtgcacatatttatcaatgtaattgtgcttttacataaaatctttgcctctataactattgataagttacaaataattttttttaagtttggaatattgccatttatacagttagtttattttttgaagatgtttatgaaaactctgtttatcccaaattatgcttgtttcacacattccctatttgtttaagactcagtgatatggcactttaatatgggagaaattatttgataaaaaggaatattttacagtcaatttaaatagcattctttataaatagtaaccctcattgcttcttttttacacacattatggggaatatcagcttattcctttacttcaaaatatgacaaccagggatcggattaccagaggtaatatttgaggtaaaaaaatagttcgagaaaaacagagcctggagatggggtggagagggagtactcaccatagaggaaatgaagataatactcttttcccagaattaaaagacttctaactattctcagagatactcaaaggaatgatgtatccataaccaaagaacagtatctatcgacaaggaacaactagaggacataatagaaatgctggaaattaatggtttggatttctctcactctctctctgtctctttccctcttgctctctctctctctctttggatctctggatctctctctctcctggaattaagttatataatagataggactaaagattatgctcttaaaacagaaagttaatacaacgggatgactgtagtcaataataattgtacatcttaaaataactgaaagtacaattgaattctttataacacaaaggataaatacttcggggggacaccccattttacatggtgtgattattactcattttgtgcctgtatcaaaactcatgtacctcatagatatatatacctgctatatcctcaaaaaaattaaattaaaaaaatagttccagttatcatctgtctactaagagttccaacttagagaaaaagagagagaaaacagtgaaagatgtagcaaatcaaattttccttgtgaatatttctgtgttaatggaacatgtgagtcttcagattgaaagtacatgcttaatgatgactggcacaaatatgcccacattagacatattgggctgawatattataactctagggataaagtaaaaataatcctcaaaacttcccagggaagagtgacaggatgtctgcaacaaagttggaaacagactgatactagccttctcgccattaataaagaatgctataagacaatggagtaattctttccaagtttaaaggcaagaataagatattttcagatgcgccgtgcatgaaaatattctactcatgctctctgtatgaaacaatttctcaagatgtcttatagctaaacaaaaaagaaatttaaaaatagtatgagatataaaaattatagtagctgatgataatcttcataaatagagttataaaattatggtatccgttaaatcttgatgactgagacattttctcttgacagctagggtttaagtggcctaggtttctatttctttctgtgcttagttctacagtaaatatgtgttaatcattattatcatatggcaatgtgccaatcacttcccatctttctcagagtaaaagcccaaaggtcttaaagtggcctaaagggccttacgtcttctgactcatagctatctctctgagcttatctcctgtcactttaatctttgctcattctactgcaygcactgaatacctgctgactttataccagttcaggacttgcttgctgtggcctctgcccgaatcatacattttccagagacctacctgtcttttttacttcttttagatttctacataagtgtcacctcagtgaggacttccctgaccacattatctgtcttccctacttcattttttttcttcatttaatcactacatgtcacattatctatttacttatttgtttcaccttccagaaaggagtgtaggtttcctttatcccacttactgtttgataatgtaaaaacaatataatgaatacagataagaagtttgggaagaaaattggggaagttgtgaaaatatgacaactgtatcctcttgcagaatgaagagttagttatattaagtaaaagtctaccaccagaattgaaaactacctgctgatgattatttgataatgtaaaataaaatttgttaatgtaaaacaatgtaataaaaaggacttgaggaagaaaaataggaaagttgtgaaaatacgtcaattatatcctcttgcatagtgaagagttagtaagtaagtaaaaatctaaccaccagaagaattgaaaacaaaacctgctgattccctctggaaagtcaaactaggatcatagaggcaaattttagcttttatctctggttatttcttttggttttaatttcggagagagaatcaggttgcaacaattatttttgtaaaaattttattcaatctagtattttttaaagtcaggattattaaggtataatttacataccttaacatttaccctgttttatgtaaagtttaatgagtttgataaacaaaattatgtaaccatcatcaaaatcaaggatagaacagttccctcatgccacaaaactttctcatactcttttgtagtccacctaccccccacccaagcccatggcaatctgttagtccattttttaacttttaacctatgtcttttatttagtgcgtttctcatagactgagtatagctgagtttaaattcttatcaaatctgacaatccttatgttttaattggtgaattgagaccatttgtacttaatctattagtcattttctatttgttctgttcttttttccttttattctgcctgtttgtggattgaatattttttattattccatattatctctactattggttttaaaaattatgtttagtggctatctgcaaacactaatttaattttagaaaaatttaaaaaaaatggatagaaaggaaaatgttaatattgtaggtatggggaaatttcctatgtgaacaatttttgattaaaacattagaggataattaataaagctaggttaattgtatgtgagtattacatttgtcttatgctctgagatttgaacttttcaaaaagaaaaggaatgttgacaagaaaatattttaatgcaggcaccaatgtctgcaaatgaacaatccatactttataaagtgtaataataaaaattaaaacatgttccaaatcctacttactactgctaagtagcagtatttacccaaatacagtacctgtttcctgataatttgcatgagtagacttgcaaattggaaaaaaaattagggagatggttggtgagagagacaaggagggaaaaggagaaggaaactggaggatatctgtgtgaaggatggcttgtagaggataggataagaattaaagagaaaagtttgctaaatcataaatgaccagagattgctttataggttgaatatggaaaataagctagtgtttgtataccataaaatatattgttactacttttttcgggggcttaggtattttgtattgagcaaaatagtttttagtgacttagttctgccatatacttgaaacttaacctgataatttggcgaagccaaacctgctataggttagttgcactcaccaccaaaattaaagccctttcgtggaagaaccaaatactgctattacagtagcctttaggaaactgtaggatctttgtcagattaattctgttataatcagaaaacctaaaatatgtagaggtagatattttagaaaatatatagattctattttctcagaataaaagaggagcaataaaaatataactttttgaatattttcactaggtcacatttcacttgttaaaacaagttatttatttgctttgtaattgatctttgactttttgttttctttgtagctgttcaacggttttgtgtatagcatttgaggttcttcagggcttgcagtatatgaacaaacatggtatagtacacagggcattgtctcctcataatatcctgttggaccgaaaggtaattgttaaatcatgtaataaatatttatatatcatttgaaattggaagcaactgggatcagggctactcagtcagaggaacaatagaatcagaatatgttttaagaatattcataatgaaaagtctatatgaaagtgatgtaactgtggtttttgaatttaaggattaaataatccttaaattatttaatctgtatatctttcacatggattatttttcccacaagacccattttctaactttatggtttttttattttactcttatttctaaagccttgtggcgtcccagtatactcctcctcttaatttattttcatttttaagaaaatggctctttttgctagaatgttattcatataaaccaactgcattgtgttttctctatttttcttctgccttctttcctcttctatttatctccttatttaccagctgttcatgcctacctccttttactattgaagtgctgtttctctactggaaatcttatggggcattaagaagaagcttgtaaacccttcaaagagaattatggatagtaaggttatatattttcaggaataattgtaatttgattccttttcataaaatacataaaaacaacttggaggaaattttttcatgggcattatttgctgtgttaggattatccttgttctctggttcttttcccaaatcaatacttgggaggctgagatgagaacattgcttgagcccaggagtttgaggctgcagtgagctataatcacaccaatgcactccagcctggatgacagtgtgagaccctgtctctaaaaaacaaacacacaaacacaaaaatagaaaattgtactcattagtttcagatttatggcagtaaagaatcattaccttatcaatttaagctgtttttaaatataaatattttataatgcttggaaataatgttcttgagaagacaaaccaattttaagatcaacttaatattttaaagccttatagattaaaagggaaaaacttaaaatatgtaaaattatatttatcatttattaagagccttatacttatgatagttatttttgttctcaaacaatataaaaagttattgaaaatctagcagattcaccaaaatcttgatgatttttgaactgatcttttcaagttaagttttcctatttcacagttaaattataactataaatggactttcaactccatggaaaaaaatttgctctgtgaaaattaccacaaaacattctaaccaaggtttcaagacagatgagaatgtttttgcctttttgttttgtgaaataactagacaatgtaacagcaaaaatattaaagaaaaatgtcatttgtcattttgagatatatatgtgtacatatgcatatatacatatttaatgagtataaagcagactattggcagatagttttttataaaattatgattttttaaaatctacagtggcattttgataaaatattgttatataatggtttctttagttataaaatgtataatgataattttataatataaattatatgttgccaattataataaattatttgatagtgttttttttctttattatcatagggacatattaaattggctaaatttggactttatcacatgacagctcatggtgatgatgttgatttcccaatagggtaaggatatgttttcctctattttgagtttctttttaactttgtaatctttgataacatgtatattttgttaattatatttgatattcctttttgatatgcaaacagcttttttaaaattaatgcatctcaattttccatatacttttaaaatgagtagacaatgagtttttcccagcatcctcgttgatgttcatcattcattgaattggcagagaagctaacagtattgacattctttacattataatatttcctaattatctgtatttcattcagaatcaaatcaacttaaggcaagaaggatgactagattctcaactaatgataatgtgtgtgcatcaagagactgaaaaacatcactctcacattattttcaatttaatgttttatgtttaattcccttttctctaagatatatattaagattcaagttgagtcattgtggatattagagatagagataaattccatacctgaaagtctatgtttaagttcagaaaggtttatttaatcacttctgttatggaattgcagatgtatgttgccctccacaaaagaaatggaaggttgtttcatgcatattcaagtagatgtttttgatacggatttctgtgttatatttgtgtggttgcttttagacattttcattattattttcttttctgaagattaagttgagattgttttagataaaatagttacaaaaatagtataaagaattcctctctacccttcatcagtttctccaaatgttaacatttcactacatttgctttttctctgttttttctccgagcatatatgtgtgtatgtgtataatgattgttttttataatcacttaagagtaattaattacataatagcactttaacctgtaagtacttcagtttgtattttctaaaagaaggactttgtttttttacatgacctcagaacagttgtcaaaacaaggaaactaaacttgatgcagtattattatctaacctagagacattaatcatattttttcaattgtaatgtgactgtttttgatagtatccatttgtgttttcctctttgggcttcctaaaatcagttctatcacaccgttactgagaattgtgatatggagtcatggagtgtgtttttcaaacagaatgttactcaaaaacttaatttgattttttttttaaagccagcctcatatataacttgcccttttttctttataactcaaattacaggtttcttaactaaattttttaagtttatgactgtgtcttattattaagacacagataataatcttaaactttattcagtgaggaaacatttattgagcaatttctcttatgcctgttggttttacaaaaataaataagatagctttctgtcctcaagaagctcattgtttagtgggagaattttctgttttgatggactgcttattaaggtacataaattcgtagtcttacagttttgtgtattgaaaacttacaggcaaaaaccaattcttgtttcataagcatgaaaatggtattttgcaaagacagtctacaatttcttatttgttcaaaaaagccctttcgaatatgaaaggggttttttattcaacttatagttgaatataagtttttagtgaggctctagctcctttgtcatgtatgataaatgcctttcgaggtgacttttaagtagctgtagtacaagtgattgctgctgcttcttttgtctaaatcaatttgtgtaagaaagaaatccaaaaacctaaaaattactttaagtttttgatttttatttaaaggtactttaggtttcagtgatgaatcgaagaaaggaggtgatttttcttaaagcatatcaagtaagagctacacttgaatttaaaatgcttggatagaattggtcttgtgttaccctttggtctggcttgctttgaagtcttagacccaaagggtcttaccagaaaatatcaaagagcaaaatgtgaaacattagccaggaaaaataaagtgatcaaacagctaaggcatgaaagaaaatatttacaccagaagaagcttgcagttgattcaaaagacaaatattaaggaacaacaaagtaaaatgttaccatctgtttcaaaatactgtaaagagttggaaattgggcattcatttcagttggccagtagcttaataccttattaaaacatcaaacagatgatgaaagccactttatttacctcatcagtcatactcacagcaaagttctggtaattgtctttgagtgttaaaatgctatgctacagaagagaaagttgttgaaaaaagatgaactacattaaataacaattctagagcttattattttttaataattttcctgtgattaaaagggaaactaaaatatttgaaacaaagtttatctctgtcctgtcagaagtttttgatataacaatttacctgtagttttgcttgatttttcattattattatttttggrttagatgtgctggaaatcaggaaaaaagatgaaaactgacttctggatgtattgtggtgatgataaaagtataccattgcatttgtattaaattttttatttttatttaatgtctatatattcactaatatttataacagctttgtgacgtaggcagtaatattccagttttacagatgaagaaacccaaatcacatatagaatatgtggtagaactgaaattagaacacaggtattataacatctagtctagtgctgcttccactagacttcagctgtttctagagatatcacacattcatttggaagagcagtatcatcttagggtaaaataacacaatacgaatttgtatatgagagaaatacatgagcaaatcataagaagatactggtatcaccatcatcattctattaaaatgaaaaaggagttaaaaaacaaatttacccatttgaatttaagtcacattccctgacttaattgacttgtattttgaatgtaaataagaagtactagcaatgatagtgtgaggaggtagctgtagaaaaggtaggaagaaaaatagaaawaatatttgaatgcctacttaatatatattacatagatgatacatatatttaaatacattttgattatacttatcattgtaagaggacataatttaatctaactggttttaaaatctagattgtggtgctcatgactaaatctgacaataaatgacgaaagggcatgcacatatgtaataagtatggcaaaatttcactccatgtctcttctaaaacggttcttattccttttatttctaggcactgggattcaaatttagcaattgctcctatgtctaattcttatttactacctgcttcttaarttgttgtttgtaaggccatcctaatgggtattttttataggaattttttttttaaagcaaaactatactgagtatatcctctatttaagtctcattggtagttgtagagggtttataaaaagataygcaagtgccctcaggtatgtagttcttttttttctaattgagatgggaggttaaatttttgtatgtgaaatatatagtatataaaacaaacatgtatagcatcataccatgtatagcttttataagatatagaacaggcaaaataggtactttatagaatcaaatcaggtattgatggcagtggcggcctgtctgggatggccactaccatgatgccggctgcagtgtggaggaggtgctgctggggctgtcacttcacggagcctatgggggccaggagcaggcaggagccccacgttcccgggcacagttgcagytgcctaagttggtgctgcagacccaggcctccctgtgctcttgggggccggaagcaggcaggagccctgctctcccaggtgcagctgtaggctcggaaatgtctactcccactgcctggcctctcccggctccctgtacacactctgatcttggagcgatgttggggtcaagcccaggtgctgttggaccccggctgggtgtgtgcacactcgaggcagcactgacactccagccccctgctgccttgactccctgtggacttcggacaccaacaagcaagggagggagtctgaaggggggctgagggcagctcagtgctggcgggcaggcgctccgtggcacgaatagcctgggcaccatgaagagtgacaggagtcagacaggttcctgggtagaagggggcaggtccctggtgaagccctgccttcaagcccaggagggcctgaagcatgggagatgggctgcaggtcccgtggacctgagtgggaacttgtggtgctttttctgggcccacccatggccgcccatggaccaatggacgtgcacttcttccctctgaggaccataaaaaccctggactcagccagacttgagcagatgatggatggccagctgtagagaggagctacccaccccagggtcttctctctgctgagggctgaatgctcatagggacaccccacctgaggggaaaagctatccaccctagggtctcctctcagctgagtgttggacactccttgggacaccctgccagtggagaggaactacccactgtgggtctctttaggtgttctatagctcaataaatctcttcaccttgctcacccttcacttgtccatgtaccttattcttcttggatgcaggacaagaatttgggacctgccaaatgtcagagctaaaacagctataacaaacagggctgaaacaaccccttgcttgccacattgcgggtggcaaggaaagaagacagaaggagagaggagctgcagccctttggggagcccagacctaggaactttctgagccagggctgtgacactctctttggggctctgcagttcctggcatctccaagtttccgggcacaaccatgttccctggtgccagccatggaagctgcttgcaacgcacctggtccaaccacagccttgcaggaagccagtgcctatgccagcacctggacctgcctgccatgccacagccagtgtgcctggctgtgcacagtggccagaccccacactcactcatacaccccttgccacgccatgcctggctctcccttggccgcgtggcatccaggccagtagcacgagctgagcacagcctgccagtccaagtggatggaacgggcccagtgggtcccagcaaaactcaggcaaaggcaccactggccacagaggtttccacctgacaaagtgacaccacaaaatcccgtgatatgttcctttatggaaaaaatataaatctttttgagagacattatagaagacctaaataaatatggagatatcatgtttatagattgttagggttagtattgtaaagatgttagttctctacaacctgtctttatatcttatctattttcaataaaaattcagtatgtgaaagagaagatacttggcaagatagttttaaaatgtatgtagagaagaacaaacacctacaaagagcctgcattttcccaaagagaaactaaaakgtatgtatgttttgagagctcttaacaattttcagtaattatttaataaaatatattttatataaaaatattttatttaaaatagtgtaatagtatactcttaggcaaattgaccaaatgaacagttgagggagccaagaaacaaacctatgtatgtgtggagatttgatttagtatacggctggcactacttggggagaaagaggtttcaataaagggaacagggctcaattgcttatttatgtaggaaaataagttgtaccttgtctgacatcatatgaaaaatgaattctagatgaatcaagaaacttaaatataaaaggctaaactgaaattttgagaaaattaacagattattttgacaaaatcattaagtataaggaaaaaagtttaattcaactgaaagataagaacttctcattcataaacagataccgtaaagagaaagaaaagacaaaaccacagagtggtagaaaatatttcaagtcataattactgaagaagacattagtatctggagttaaagaacaactgtgcagtaaaagattatcataggaagcctaagactgctatccttagaaactaagtcctgctagcaatgtttgcccttggctgttgccttgaaacttgggttgcagaaatgtccccatggatgcctaactgctgaggctagtttactgtgcttgtaaacaaccaaagtggtttatgctgaacacttgctttccttcttgagttcttgaatttttgtacatgccaggcagagagtgcctgtgtgacaagtcccaaataaaatccttggattttcaatgagcttctctggccagaaacatcacataacatttgttcttcaagattggaaagaagttaaaaaaaaaagaaagaaaagaaaatgaaagatacatcacatacgtggtgctatatttttgttgctggaagaagaatgtattctgtgtgatccctgataggagggagagagcataaggaagcctgtatataggttcctggagactccctctctatctttgtcccttgtgatccagctatgcccttactatgtcactgtaataaatcttagctgtgagtacacttatttgctaagtcttgtaagtccttctagtgaatttctaaacatgagagtggtcttggggaccccaaaacaactagagaaataagcgaaagtcttgaatgggcatatcacacaataataaacccaaatgactaataaacatatgaacatatgcctcaatgtcattaattttcaaggaaatgcaaagtaaaaccacaatagattttatataccagattgttaaacattaaaaagtctgtcaaatatcaagtgttggtgaagaagtaaaacaataggaacagtcattcactgctggcaagtgtatagattggtataactygttttgaaaaacatttggcattgtgtaatgaagtagaaagtgcacatatcctatggcttagaaatttgggtctaggttgttaaccttgggaaccttttgcagatgtataccatacatggcattctgtgcaacgttgttcataatgttaataataaaaagcaggaaacagcytaaatgccattgccatttgaatgtataaataatgttatgttcatataatagaaataagaatttaatggatatagcttcatccaacaatatagataatcttgattgaaagagcaaaagaatacagtcatcctaattccagtgttataaagttcagaaatatgcttgactaaacagtacattttttagggatacaaacatggtaaaaccatcaggaaatggaagagaatgacaaacacaaaaattccaggtgtcttctctggaggaacaggggtggagatacaatcagggagaagcacaaagggacttttggtgataattttatgttcttcacttaaactgcttcttggtacatgggtgttcattgaagctttcttctttatgccttattcatatttaataggcagtgttttgcatttattcaatatttgctaaaccggttttcaaaaaacgttttatgtcagtgaagttgtgaggaaataggcaccctcatgtattacttatgacaatataaattgatacaacctccccaaagggcaacttggtgtggtaaatcaaaatttaaaatgcacataccttacgatcttggaatgccacttctaagaatatatctgtcatttatatgcatatacttgtgggatatgtaatagtcataatatattcatctcattattggtaatagcaaaagaatggaagttccaaaatgtttttgtttcatcaaattaagtacatcaatkaaattattgggagttttcaaaaagaatgaggaaactctatacttgtgtttttaaagaacaatctctaaaatacactttaagtggaaaaaaggtatatagcaatatgtatagtattccaccatgtggggcagaggtgatgggtggacaaagttatatatacataaatatgtatggatgacaggggtgtagagataggagttttacttttcaatttgtatcttttttatagcattaacattcttactactaaaaataaatacttttttaaaagataaaatgcactttaaatattaattcagcgttaagggaagataggcaataagaaggaaggaaaaacacttggaagcctagaggactgtgttaaaaacacagagagaagcaaataaaggagctaatgctggagggagacatgaaggttttaaaactatttcagayttgtgtatatttactcttgattccttgacattaaagttctgtattatgatggttagtttagaatgctttctagcaacagttgttartttaattgcatgagacttttacatagatcttaccacattgattgtaaaaatgtactatcgcttctttccctgttgtaatttttcattattttaatgtatcattacaggtatccctcgtacttggcccctgaggtaattgcacagggaattttcaaaaccactgatcacatgccaagtaaaaaaccattgccttctggccccaaatcagatgtatggtctcttggaatcattttatttgagctttgtgtggtatgtataaagaaatattaatataataaaaggaaattgtgcatttattggaataatcttttggagaggaaagttaataatagtatgtttttgctgtacaaattaattacatatgaggagaaaaggcttaatttgacttaatcatgtttgataatttcacatattttttggcatctctggaaacatacttttactaagtgtgaatgtaaatgttaccagatgtatattattttgatatctctataatgtgtatatttttacaaagttaagatgtttatattaagttatataagatatatggagtaccattaaaagtttaacaagatattgaaatgaaaactacrtttttagaagattgatatgacagtaatgtaagattgagaagaatagcagctttttttcaatgaactctacctgtagttctgatttggtaagtgtttaagaacattttttcttctctattaaaaaaaaatcaaagcatctcttttttctataaacaccaggtaatcttaagccttttccttctaagtttatttaaatgatcatataagcttaatttgtttatgataagagaaatataatgatagccaacattaatgaagcatattctgcattacataaccctcaccataacctgtggtatatstacagttaatattttaattttacagatgagaaaagtgaaacttcaggtggtattaagtagtttgccaaatttatataactatttgatggtggaagagtccaatttggcacacaatcattgctcaactcataaatgctgaaggtataagtgtttgactccagaccttatactaaggagcctcctgaggcagactagtaaggaaataattaaaatataatgtgtgcatcttaaaatataccaggtgctgtaggagcatgaaggatggctgtctgaagttattgtggtaagaggaaggagtgttatgaagtttttttaatggagaaacagactaaccgaatcatgatatttaagtaagaattagctcggtaggcgaaagagtataatcagtcttacccaggaggcatcttggtctcaataaagtaagactccatatggcctggaatacatctagatatccaggtatgtgtggatctcaaaagtgaacaatgcttacatcaaactagaatgtaatgacccttagrtgtataaaatgtttaaatgataactattatgcaacactttctaaaatgttatttcaccagtaatttttctttagtggagctgactttaaaaatccattaaaacttttggagataaataaagatgcctgataaaatcagtttcagctataaggggagaaaaatgccttcctagaaaaaacatgtaaatattaatrgaaatttcttttctyattttatttagggaagaaaattatttcagagcttggatatttctgaaagactaaaatttttgcttactttgggtaagtgtcgtacaattgcttatctttcaaatataaatataacttactattagtaatcatgcacattgaggatgtgttcttttgaaatagtgagtacactgaaatatcctccctttactcaagttgctaatgatcagtggtaatgatcagcagaacagcatatgaggtcccttctaaaatattacagcagaaatttctttattctctgaggaattttaacctagatggaaataatctcagctttattatctagccaagtaaattaacttgtgaaatcaaaatgagaatataaaattgtatttctgtagcagtttaccttcagacaatgtatcttaacttttgggctatctttctatttgatgaatcatgtacaaataacaactcaagaagaatattgatttttccttataaaaggctcatatgaattttcatgtatgtggatcyaaacatgtataattcaaattaataaaaatttatgtaatctactttggagtggaattaattaagcatgtttggtaattaaggagagaaaaacagtgatagaacactttatgcaaaagagtgacagattagtatccaagttaaaaacatttacaaataagaatatgtacaggaaagtattagtaaacattaaataataatgaattataaataaatttgcaaaagttttaccagatttaccacatttaattacaaagattgatactacagctattaagaagccttggagattcttaaatgtggtctgtaacctaaactttttactttaaattcccaaataaatgtaagtacattttccaaattatgtacaataaaaataagttagtcttgtaatcatgaaaaaacaaaacaaaactacaaagccttcttaaaaagcgctgtttacatacagtcagttcttgaagaggattggttctagcaccctcacatgtaccaaaatccatgtgtactcaagttccacagtcagccccacagaacccatgtgtatgaaaagtcggtcctacatacatgcagatttcgcatccacaaatactgtattttcaacccatgtttggttggaaacaatccacatataagtggacctgtgtagtttaaacccatgttgttcaagggtcagctatgtgtgtctgcatgtgtatatttagagagagacagagagagctagagtatctttaccttccttgtaaaggaattgctcctttatcaaactatttaagctggtatctttcagtgtcagttattcaattagtatttatctgaagcttttcatttttatcaaaacatgtaaagaaatttaacaaaatgataaagttttcagtattttaagtttcaaaattgcattactccattaaaacatttttgatcagtttattttctggtttgttggacagattagaaaaatagcatttattcatatagtttttctgttttatagattgtgtagatgacactttaatagttctggctgaagagcatggttgtttggacattataaaggtttgtcattaatctgggtcttagtccatttgtgctgctataacaaaatacctgatattgggtaacttataaagacaaaaatttatttttccacagttattgaaactaggaagtccaagttaaaggcaccagtacgtttggtcgtctggtgagggctgcagtcttctgagagagaaacactgtccttacaaggcagaagggcaagctaggcaattgctatgtgaggtctcacctttataagcctcttaatgccattcaccaggggaagagcccttatgacctaattacttcttaaaggcctcacctcttaataccatcacattggccattaagtttcaaagttcatgaagcctaaactttggagggaacacattcaaaccatagcaatctgtgaatgaaaatttattttacacacttgggatccagttggaagctattttaaagcaatgcttatttctctttaagtatttgctttttcacagtgactaaatttgtataaagtacaaataaaaactttaaaaacatcaaaaacttctagattagcaaacatttgaataaagtatatttctaaaattgatcattttaattaattattttctctctttatttaccaggagcttcctgaaactgtgatagatcttttgaataagtgccttaccttccatccttctaagaggttgatattatttagagattgggattacattgagatcctttacgcataagcaattggtttttttcttgttttaatataatggattaaagataatgtacatatggagtagtatataattgacatcagtatcataactgtgaatgatgtaagctttcattttttgtgaattaatgaaaaagtaattaaagttaaactacggtcagaaaactgacatacactaaagaagttactagttcattttcaagcttttaaatagaatattaactaaactatggaatgtaggtattcctagacccaataataacatcagtgaaatgagaataaaagtttgttgtcaatatgtattatagcaatgaacttggatcagtggtgtgataaactaacaattgttgacaataaaaaaggatttcttagaagtttcattaattgactttgacttgatgatgtcactactagtcatacagctatccctaaattcctttactatgtaatgtttgaaaataatgtatacaaatttgcctttagaaaaacaactttatcaagacatgttagagagaaatagttttgtgtcaatgtaccacattaaaggacaggaagaaaagccaaatggtattattataatagtttgcataaatattatttaattatttaagatattcagtaaagcaggtgaatgctagtcagggtaaaagtaaacaatgcagaagcttttatggaatgatatttttgatacatcatgaggtaaagtacaacataagtaaaaaaaattcagtatttactcacagttatttgattataatataaaagtatgcatctagactctgcaaaagagagctgtattattttctgtgctaatgaggtatttaagacttttatccattmtcttgaatgtatgccattattctaggaaattttttatgactttcattcatgctctgtattttaaatgttctcaaggccaaccccagatsaattaatgaaggacaaagtattcagtgaggtatcacctttatataccccctttaccaaacctgccagtctgttttcatcttctctgagatgtgctgatttaactctgcctgaggatatcagtcagttgtgtaaaggtaatgataaattaaagcatagagaataatatgagccttgtttttaaagaagtttccttgtcctactttcagttttgaacttatcaacaatatatattggtgggatcatgggaattaagagacaattctggaagtgattaaaatataactgactggctgggtgcagtggctcatgcctgtaatcccagcactttsggaggtcaaagagggaggatcacttgaggccagccatttgagaccagcctggtcaacgtagagatatcctgtctctacaaaaaacaacaacaacaacaaaaaacaaagtacatgcacccacgcacaaatatatatatatagttagtcagagcctaacttccttggataatatcagagcctaactgaactggtgaggggaaatagcaaattgcagccagctctagccttctgtgtggtggttaaagttaacagaagcattctgtagtcaatcctgtgattagttctgaatctttaagtgagcctgtgcctctagcctttaaacaagtgctttcttgcccttaaggagtggctagaatacacataaacacacacatttgagctaacagtttatcctttctatttaagttactgatattctatataatttatttataaatgatctctaaaaataatattattgataagaattatatatcattatattctgcatattgaagagaatatcagcttttagacttttaattcttgtgtgaagattacgactcttggaatgtaaggtttagtgacaccagttacctttattctgaaaagttgttatgacttaagtcatagcagaaaatggttactaaayattcattcaattaaacatttattgagttcctggtatgtgtcacatactgtatctttaagtaacattcatgccaaatgggaaggcagacagacatttaattatacaatcactgttataaatgaaggtcaatatgaatatagcacaatggcagcatagcaggagcacctaattctgtatttctgtctgggacatcaaggaagacttcagaaaaggcagccagccgttgccttgagatatgagggaaggaacaatttgtgttggttgcctccccatgtgctattttctccccttattccttttccaatatagagtgtaaaatttccaatactatgtattcattataaagggtgaaaattccagatgtttttttctagtttcccttgctatgggcagtaagcttgtgaactagagttggctaatgggatctaaatgaaagtgctggacataagggctacttatagggaaaaaacaaattttcttgtcaagaaaggtactgcagcataggttcaccactttcttctcttctgaatgcagaaaatggtctagaattttgataagcataggcccctcctgtacctatgattttattaacagagatgaataaatgtctttattatataagccacttttagtagtatattattttcagtcgggagcattcaaattattacaaaaattgaatcagaatctgccagtcatggcatacctccagtaggagaggggaaatatcaagctccaactcgttctagccaccccttaagggcaaggaaacactttgtctagagtgactggctcacttaaagattgagacctaaattgtaggactgactacagaatgcttctgttccccataccttaaccaccacatagaaggctagagctggctgcattttggtatttcccctctccaggtcagttaggctctgatattatctaagtgagttagcctctgactaaccggtttatcctgaagacagaccttgttaagaacagtgctcattgtatttcagaatggttacatttcctctgccactgctggaaacataagggcattttcctccaatatttactgtgagaaccttgtcagtctccagactcacaaaagtgtggggctatcccttttgactggttccctctggagtttttaactctcagacttgtccacactgagcctccagtaatttatcaattacagtttaggttttccaaacttggcactggttyctgaggcactgctcatgaatgtctgttccagaatgccatagctccctttattctcctctctgtctccagtcctggggacagaagtttgtcctatgtcctcacctctcttacagatccaagaattgttgatttttcagtctgttcaactttttatttgttgttaggatgragtagcaaatttcaggctccctacaatcagaactaggaactggaagtctgttcttcagagtttattttttttagaatggcagctattactgcctgttgacgtttaataaaagtagaaaatataatacaatgattccttaaatttgcttttaatagatataaataatgattacctggcagaaagatctattgaagaagtgtattacctttggtgtttggctggaggtgacttggagaaagagcttgtcaacaaggaaatcattcgatccaaaccacctatctgcacactccccaagtaaggaaagaaacttctcttgggaatttaaataaataaatacatggtaataattctatggtaataataaaaaagaaaatcggtgtttttttttttaaattggttgtttttaaaatttttttggtaggcatcccagctaagtgattattggaagcaattggaatcaacaccttgtttgattggccaaagtttctaattgcagagttcccatcagttgtctttgatcagtaatttgctttgtgacctacttgaagtgaagttaatattatggaatatcttgcaataattgatgttaatgaaaaatacacaagtcacaatagaatatttaagacagttaactaaaaactagcttaatgttcctactatgaagaactatgttctttttccaaatatacttgtaaatgtaaatgaactctgtggtctcactgtgtgtcctagagatcattactgtgctagtgtgttgcaaaaaaatctgcctaactgtataagaagatatcatgctagaaattagactggaagttaaatacctctacagccttggggctaagattgttattaacattgctattcatgtttattcataaaaatatgaacctaaatttcttgagcttctactaatactttaaatttttaattttaggctgggcatggtggatcatgcctgtgatcccagcactttgggaggcaaggcaggtggattgcttgaacctaggagtttgagatcagcctgggcaacatggcaaaaccctgtctctacaaagaaaaaaaattagctgggcgtggtgttgtgtgcctgtagtcctagctactcaggcagctgcaggtgggagaatcacctgagcccagggaagttgaggctgcagtgagccaagatcatgctactgcacttcagcctgagtgaatgagagaccctgtctcaaaataaaataaaattttaatttttagatttctagacttagttttgattattgtaggcaactgtagaagtcatctgctcatcatttttttctttactttttaaacttttgtattgtttggattgactagtttctatttttttctctcttaatctgatttttaaatgttaactttgattataccattcatacattgaattaagtagaaagttagaggtaagattacggaaattccaagaagaaatggtttaaaggatatgtagattcttaaaagtaatttattgaaattgtaaacaaattttattcatttattatttaatatcctttcttctatgaggttactatccaatatgctttttctttcatcttccctttatctttttctacacgtataaagtttcttgggaacacattgagttaatgtcaggagagtactgttagcattgaaactgcatgaacaaagggttgtaaatgacacttttgtttttctgaaattctctatacttacattcataccaactcaagagatatttgaaaatgagacttgtttgaagaaatctcaatacattgttttatatgcaatgtatatgtggcacatatgtatatgtttatgtatatgtggcacatatataccatggaatactatgcagccataaaaaatgatgagttcatgtcctttgtagggacatggatgaaattggaaatcatcattctcagtaaactatcgcaagaacaaaaaaccaaacaccgcatattctcactcataggtgagaattgaacagtgagaacacatggacacaggaagggtaacatcacactctggggactgttgtggggtggggggagggggagggatagctttaggagatatacctaatgctaaatgacgagttaatgggtgcagcacaccagcacggcacatgtatacatatgtaactaacctgcacattgtgcacatgtaccctaaaacttaaagtataataataataattaaaaaaacattgttttattaaacatccagtctaaagtttaattcttttttgatgaagggattgatgacttagaataaactttactttctagaagaaacartaaactggattttgtgtacatattatttttaaaaatttcttttcagttttctctttgaggatggtgaaagctttggacaaggtcgagatagaagctcgcttttagatgataccactgtgacattgtcgttatgccagctaagaaatgtaagaaagatattttgacagttctgctttaggtttttttctttaattaaaaccttacagatacacaaraaatcttgtatgcctctttgatttcacaaaatatgggagagcttctgtaaaatatgtgccccagagtagaattgcatctgtacaacttcagctttattacctgattgttcacaaaaatgattttatcagtttatcttttcgccatcattgggtaactgttctcatttctttatttacctggtaacactttcttttatcacattttaaaaaattgttaatctaatggtatggaaaggtattttgctgtaatactaatttttaatttcctgattatagtgcagttgtaagtcttttcacatattctagcagttcacctacctcttctatgtattactagttcatatctcttgtcagtttttctgttgagtgatttcttattgatttgaggacttttgaaactatgtccctgatatcgtatctttgtgagctatatgtcatggaaatatattctaatctgtggcttttccttcaactttttgattcttttattgaatagaattctaaatttttatcagtattttcttttatagtcaaatatattttgatatattttttcttgtaacttatttaaagtaatagcaaggttataagtatgttttataatgtttttatatatttccttataaaagatttaaataattgtttcacatttagttctttaatccacctagaatttattttagattaagttgtaaggaaggtatccaatatcatatttcattgattaaaaaaataccccttgtctcagtaccatatattgaatagttttctcttcacttttttgatctataataccaactttttctatgtatatggatatgtttctgggccttgatattctgatttgttggcctgtttttctaattttagcaaataccacattgccttaatctgtagttttatgtgaactgttgatatctagcaagggaagaccttcagtttttttgtcctcaaaatggagtaggaactctttaacatcttcctctactagctgatttttataatcatcataaagaacttcataaaaaattatagggttttgattgacattgcattgaattgataagttaatttgtagagaattgatgtatttaaaatgtagggttttatttcttgaacatgcttaaataaatatgtcatttatttgtcttattttatataacaattttatttttaatgtctgtatatcagttatcagatttatttctaaggtaatttattattgctcttgtatatagaatatatatatatatgtaagtatgagtatgattttttccaacattttattataaaaatttttaaacagaaaagttgaaaagcatttacagtgaacaacttaccacctacatcaagcattgatatgatctattagcaaaatcaagtcacacctattcattgacctattatgtatagctgttttgttctgcattggcagaattgagtagttgcgatagagactgcatggcccacaaagctaaaaatatttgtcatatggccctgcatagaaacagtttgctaatccctgacctagattctataattaacattttacatgctttatcacatgtctatctttctagctattcatcaatccatcatattttttgttcttgcatttcaaagtaaaatgaagacattactacaattcagcttacacattagagtttaagatttgtttatagttcttttctaggcaaaattttcatatagtaaaatgtatagatcttaagtataccagtagatgagtttaaaatatacatcaataatattttttcatgtagtaaaatgtaccaaatcttaagtataccagtagaggattttaaaaaataaatcaataatattttttaaaatactatttcaactactgttttgtgcatgattagtaacacaattgatttttttatgtggattttgtgtcaggcaacattgctgaacctattcttttttaaataatatgtctatagattccctgtggttttctttgtgaattaaggtagggttttttccttcatttccaattcttatctactcacttcatcttttctcattatttttgctgagcgtctataacgctattgaatagaaacaaatagtgggcactcctgtctaatttctggttttaaaagtttgctttttatatttcataattaagtatgatatttgttgcattgagttatagaggtcttctattcttagttataagttttgttatgaatgggtgttgaatttcactgagtgtttttactgtatctattgggatggtcatatgcttttttatgtattatgttaatggatttaattatgttgatggggtttttcaatgttgagccatgtttgtatttctgggataaacccaaacagatcatgatttcatttttccttttttatacatttgtgttttgattttctaatattttgtttagaatttttgcatttctgtttctatttgagataggcctgtgagtttcttttcttttactgcacgatgctagtttggtatcaggggtatactagtctcataaaataaataggagagtgttgcctttttttttctattttctgaaagactttatatgattacatgtatctatttcttgaatgtttcatgggagttagctttaaaaccatattgtaagggctccttatccctatttgggtgtartcattacttcagtctgcttaatggttataagtttactcaggttgtttattttgtttttaaatcattttctaaagttatatgttttaaggcctttaaacttgctcttcccactgcctgtaacactcttccggtgcttccatttcttttctttacattctctgctaaaatgtcacctattggtgggcttttgttggccatcctttataaaatagcaacgccacacctatcccttgtattctttatcctgttttgtttttttcctccattgtacttctcttcatttgatgtgttatatgttttcttcctatataataactaaatgaaggaatgaatcctgttattatgtagaagccctattaatatcatagtaaagtataggggagaagtattttataatcttatcattaagtcccagttttttagtgagcctgtgttcctgggctgtgaccttcacaaggcttctcagcttctcccactcctcctccccaacatgagacaggaaagctagaggggctggagttgggtatttctgttcccctacatcaaagactagagtggactggagttgaatatttccttcccaagttggttagatttctgtaaaacccaagttagttaagacctgaccgaagagtttccctttaagacaggcctctcaaggaaaacagagtactctggctgtatttcagattggttactttccacctccccctgcaggaagtcaagggtatttttctcagatcttcaccctgagaacctggtgggacctgcagaggttaatctcatggaagcaaggaaggcctccctaaggcagggcctccagaagtttttctctctcgtattagtctgtgctcagcctgcaagtattagataattaccttttaattgatcttaacagactccagcagtggctctgttcctgttgagctgtgattccctgtattcgagggtccctccagctttgaggacatcacaatgctctgattctgacagatgtgagacgagttcttgattttcagtttgttcagcatttttcttgttagaggaagaatgatgccttctaagctgtttatattttgtataagaaagtggaagtcctagcctttttatttttaaccattcatagccaaagctgaaataggtacctatccttgttttctgtctaagccagcaattcccctagttttttctttacgtggctttagaagggtcttctccattctgaaggtctgttatgtaggttcccaaacccttatcccattatggtctaaatctctagaccacagttattaactactttctctctaggcctggttttatatctgttatcactgcattttccttatgttttaaagcttatctaaccatttaatattttacatgttatatagtaggagagtattagaatctcttgtctgccataatgccagcaacagaaaattaaaatatataactattcctactcagtactctgaatttataatctctttgaaagaaaggatgtggaaagtaacaaaataagtaataataccctgcagcgaacaataaattacatccaaaatatatgatttcagctgattttgttttgctcttaatttgtttcttcaatttaaatataatccaagttaaatgaatgtaggcttcaaatctaaatgtctcaattcctttacagttctacttgtgaaatttamaatactcttcttctgtagttattaagaaatattaatttgctgaatcttaaaatgatatggaaaccatataataatttttatctttagtgttttcattcaccttttaaaaatcctaatgtgctaagtttttatttagaaaagacagacaagatacttaattagataaaatctatgacatacagtatactgaaaactaatctttaaaaagatttatgtgtattaataatgcagtaaaacttgggaaaattttatttcctaacttaaaattttaatatatgaaagatatacctaaaggttttttaaaataggataagtacatagcacattgatttttagagtagaaccaggcataaattcagtgtttgctgaattcttagtttgagtaaaagatttttcttaagctttaaaaattctgggaataactcacatgggtgcacaaagactctaatcagcagaagatcagtgcttgctgcacacacagcttgaatttctatgtcaatccccataggagcagacattctgccttcaagttggaagttgaacagcagagcagcaggcaagatggcattaactttaatcaccttgcttaggatgtggttaacattttactttactactgccttcctgcttatgattttgaagaatacctgtaatcctgtcagggttgttatttggaacaacatttattaaaatgattttgtcattaagtgaactctctccattgatttattagctatttgaatcatacatgttcaaagtatgatgtgagaaatattttggaatcctttttctagcacctttctttttgacttagcttgtattatgccaaagcaaaaataaatctaagttgttcttttagtatatacatggctatatagtacctctttttaatcatctttcttcatataacttaaaatttttttcccattcattaagttttatactagtgctagtaattctgagttctgtttggaaaatatatcatgataagtgtctaacatttatgagtgatacctatagataagaaaaaaatagttgtttttcacagccaaaccttaatcagtagaggcattgtatgcttgcatgtttatggtaagaactgatttttagactctattttatacttttctaggtccctttataaatttatagttgttatattacttgtctttttaaacacagatcagggtttctgcccaatatgtttatacataaatattttgtctttaaatacacagagattgaaagatgttggtggagaagcattttacccattacttgaagatgagtgagtatatgtagtctcattttagatttatttttctttctatttatattagatttataagaattttatacmttttctttgaaaaatgtttcctaaatagaaaataataacctgaggttttggtttattaaaattttgtgctttttctgaaatcactgttggtagagttaggaaaaaaaaagaaaattttgtaccttttgyccattttttttttttattgcttttgttctcttttacagccagtctaatttacctcattcaaacagcaataatgagttgtctgcagctgccaygctccctttaatcatcagagagaaggatacagagtaccaactaaatagaattattctcttcgacaggctgctaaaggtatggattctaaagtataaagtgttaacaatagcccatatggaatttttttttaattttttcaataattcttagggaatcttgagtaataagaagattaatttttatgacctatcttgttcagttagctttctttcattttaaaaatgatacatgttcttagtaagtaaaattaaaaagtaaaaacaaggtgtggtaacatatgcaaaatcatgttaaaaaaggaataatgtctttattttttaaaagaagacttaaaagtcaacaggaaaaacatcaatattgaaacagagaaatggatagagtacrtaatataaatacagctagtaaatctatgcaaattgttcatcttcactgggaatgaaaaaaatacaaattaaaataggagtgattttccatactgcattagcaaagtgagcacagatgcaatgatattggaactctcattctgttggaataaatgtgaatgtactgaaacattttgtaaaacaatttgaatgcatatatcaagaaccttaacaacatctgttgcctttgtcctattaatactcttctagaaatttctcctaagacacaaatttataaaagtataaatttatatgcaaaatgcggaagtactcataatagtagcttatagttattgatcacttctctatcaccacgtttttaacagagtgctttacctgcattatcttatttaacccgtatgagactggtactattatcctccatctgactcatttaaaatccccccagagcatcaaatagagaggaaggattaaaaatcaggtagaatcagctgctcttcttaattatataatacgagtttttcaaggtgttagggattcattcattctactgcttatttatgtgtattaataacaccagacacaataattgcacatactttgraatttattgcaagtcacttaagttttatcatgggtatattcagaactgtctagactaaaagatggcactaggtaatttgagacgttttcatttcttttttgatatcataggcttatccatataaaaaaaaccaaatctggaaagaagcaagagttgacattcctcctcttatragaggtttaacctgggctgctcttctgggagttgaggtaaggaaaaaagaaaaggttagaagctgattaattatgcaaagaaaggatggagaaggasagtgctttccaaatatatatttttctagttattagaaaattatatagtaaaatataagcattagaatatttggcaattttaagtggaaagaatataggaaaacaatagaatagaaaaatataatggagggtttattagattatgctatttaatgtttcatttaatagtggtcacagaaaatgttttgattattaccatagaatattttaagaatatatatcagttataaatgggtagtcctgcttataaagtatgcttgttatagaatatgattgtttataaatggttctgtctaaatttggagaaatctttccatctaatctgacttgtcaaaatcactaacataatttagtgacttttggcacacctattccacctggactatgctaccaagagaaatagcactttctctgtggttgtgaggaaagatgtgtcacaaattatggtggcctgcaatactaacagagaactccgatgacatcaatcataataatgggccaaattcttgccagatttttttcatttcttgtcaatttctttgtcatcttgtcttcttatattctcttatagataattatccttcctttttaaagaattccagtctggaatggtggcacatgcctgtggtcccagcttcttggaaagctgaggcagaaggattacttgagcccaggagttcgaggctgcagtgaaccttggttgtgccactgcactctagcctgggtgatagaactagaccctgactctaaaaaatttttagaaatcctcaactatttttaatccttttcaatcctctgtttgaagaatttcctttcttcattcctgattcccttgataagagtctacaaatacctttgagtttagttggttactttacaagaatgccaattgttcaatatcatacattaatcattagacttgtagaacaatataatgctaaagttcaagaggacttcaggtatcaggttgtccaactctcattaaattaatgtctcaaagaagttgataatagccgatattggagtttgaaccctacttcctggctctttctctaccatgataataagccagaataataatatttttttcatgcttggtcctatagaacacgaccaaaatttgtagtcgttcattcagttatttctaaattttaacagtctaactgaaaagcgtaaatgacctctttaggccctaatgattctatcatgtaattatagatataacataacaaggttgtgttatgttgtagggtctgggaggttggccaaacatacttactagctaagtaattaatccatgacatttatgttctgrtatgtataattcaagagtttgcctcagcaaaatggcaaattgtcacttatcagagaccttcatcacagattgtcaaagacacagagaatttctcttaagatgagttctaccctgagtttgaatgtgcttatctgtagttgggtaggtttccaaagatagatatttgtaaaaaatagatttctctatattactatttgtrttaaggatatgataaattaatatatcttcttttattttttgcagggagctattcatgccaastacgatgcaattgataaagacactccaattcctacagatagacaagtatgatttaggttttcttaagcaacctaagataattctgccaaatatttaaattttaggaaggagcatgaagaaagcctctttctctcatgaatacagagacactgctgcatacatatattgttagagaaaccataactcttatgcttataaattagtaagaacaataccttaaaggactttaggtcaagttacctttttaaaaatactgtagttcttcatctgaaaaatttgcccttcatttggaccagattataaaggaaaatatttttgaaaagtatattaacacatacatacctttcaaaagaaatggtctaattctcctgtttaggtatacatacaacttctttagtctttccataagatcaattaaaaaattcaaaaaattaggcacttaagaagttggtctgttttgaaattcatattatagcttctccttttccttatttaatgaacaaggattaagggtttrttgctgattacacaattactgtttcaccttattattttgctattttaacagattgaagtggatattcctcgctgtcatcagtacgatgaactgttatcatcaccagaaggtcatgcaaaatttaggcgtgtattaaaagcctgggtagtgtctcatcctgatcttgtgtattggcaaggtaacttttgtagtcattaaaactcctctggagtattagaaaattgttgcataactgacatttaaaaaaattaaaatatctaaacatccttgtctttggggaaagtcaatattgacgctctgattcattttttgagaggtttacatccaaacatttttaaaaatctttgtctaaatcctagtagatatcattaaaaaacataatatttaatatacaagttgattagcaaagcagaaagaatatttggagctgttgtgatctttgtggatacattttttaaacgcctatgcaaattgttaaatcaattggggctagttgagattcttatagttaatgatttctaatttatacttaccatggctattagcacttaaaaatagtctatcatcctaaagtcctcattttatttattgtcttttttttcttgtatctttaatggttcatatcttttatttttagctttgccattattattttttgtgtttgataaagaatgagaaacccattccaaccctatttttgaatgtgttgttataagtggctacttttatatttcagttctctatttcttaccatagtttaaataaagctgttatttttcttagctctgtgtatttcagagctattctatatcctcctaacagttgtaggtagatttatgtacattctttcaacatgacaatacatgcatatcattattatcaataaaagaaatgtcatatatttggaatccacttcacaatttttaaagaattttttttcataatcccaaagaaaaacaacataggcaaaactccatgtcctagatgagaaagtatgccagaagatgttaagtaattgccaagattgtacatttagagtcagagatgggacaatatccaaagcattgtaacattcttacatttttctattattgtatttctcttttcaactcataataatatagataataataactgattcatattggacacatactgtgtgctacactatcactcactccccacagtaactcatgaagtaacatatttctggatggataatacttctaatgtttaatctacttggaggtaatgcaaagaattgaataaggtatatatcttcaattctactagattatatttatttgacttctttctcccaacccctctgtgttaggtcttgactcactttgtgctccattcctatatctaaacttcaataatgaaggtaagcctctttaacatttaaataatcattgcgcataatattctaaaatatttgattcacacatgaaaggtttttgtttttgttttaaggctcttattctctccctggtagatttctgtgaaataatctattatagactcattttagagatgtgaaggattaatttattactggagagtttcagttatgctaaagctattactagaaatttagtggaatttgattattctaaattctttagagattaatttttgtctaagtatactttctaaagaatttgtaaagaaatcaattatggtggcacttttccataaccttgcatctccaaagcctatcattttggatacctcttccttaatgaagacttttctcattctccttcttcagcccataaagcactttgtatttataaaaatttatcttgtgtctatcttgtattctaatacttatatactaatgttgtaatattttttgacagccctttttcaatggcaggttttttttttcctgcccttctgcaataactttattattgtaggcttttcaataaatactaaattcgattaactccaatccctgaaatcacatatagagtgtgttactgtatatagcttgaatgtctagatgccttatctgaagatctccctattttcagattctatttcatgaccgaatttgcatcggtttctggaattaagtaaaaatagcataatcccagagaaatgaaattttactctttgaattgtttttaaaatactctgttctgtgatattctcactcattaatctagactagagttttttactatgtttagttaggcatagccaatgatcactcatactgacccaaacatagtcaggggtctgtgtttgaaaatgtgaattataacactattcctaaatccatagttcgtagactcttgtttgcatcagcagcagttaaggatcgtgaggtccgtataacttactaataatgatcatgcttagaaattttaagaaacaacgtttaggtaataaaagttgtgattattgtgtgataatgattgccatgctagtttgaaattgaagttatagaattattattttttgttgtctaaaataaaaatattttctattttaaagcatagaggcttttatctcttaattttgtttttctagcacttggctatcataactgttatttaatagtagtttcaaggaatatgtgctaagtgaatgcattactgatggtcatctaccctgttaactaattttttacatgcctttgccttattctcttttagccttggcttatgcatgyatgtctgcttttattcccaaatacctgtataacttcttcttaaaagacaactcacatgtaatacaaggtaagcaaatgtcttccatgtctttctacagagaaactactgatgtactggtgtgctgatgtaatatttgattaaatttaagattttgaccccaaaaatacgatgatggtccatccaataaaatccataaagagaaattagaaagttcagtctttcctccaaatccacaaagaattatggtatttttctaatggatatttgatatctgatctcatttcagttcaattgcaggcatgcgagtttgagaaaataagagactgcygtttgtgtttttcacaatcaaaattgctcacaaaaagcttcaccatgggcaagtccattgtaaattagtaaaaagtttaaatgtttaattgtgtaagcagagtattaaaaatactttacatttatctcatttcccatgcatgcatacccaaaatatactccctctttcttcaacttccctaaaatatacctcctccttaagagttcatgtcatagcgtaacctgtttgtgaattcattcaggacaactttagccacattcaaacttgtactayaatttcctgaactcttttttggaagtaatagaatagaagttaaaaatacgcagatttagatagaaaaaaaaatcctaaaatttatatggacccacaaaagacccagaatagccaaagctgtcctgagcaaaaagaacaaaactggaggaatcacattatctgacttcaaattatactacagagctatagtaactgaaacaaaatggtactggcataaaaacagacacatagaccaatagaacagaatagagaacccagaagcaaatctatacacttacaatgaacacattttcaacaaaggtgtcaagaacattcactgttcttaaagtctcttcaacaaatagttctgaggaaattagatcttcatatgcagaagaatgaaactagacctctatctgtcaacatacacaaaaatcaaatcaaaatggtttaaagtcttaaatctaagacctcaaattatgaaactactataagaaaacactggggaagctctccaggacgttggtccaggcaaagatgtcgagtaataccccataagcagaggcaaacaaagcaaaaatggacaaatgagatcacatcaagttaaaaaccttctgaacagcaaaggagacaatcaacaaagttaggagacaactcacagaatgggagaaaatgtttgaaaactacccacctgataagagattaacagccagaatatataggaagctcagataactctatagaaaaaaaatctaataatctgattttaaaaagggcaaaagatttgattacacatttctcaaaagaagacatacacatggcaaacaggcttctgaaaaggtgctcaacatcattgatgatcagagaaattcaagtcaaaactacaatgagatatcgtgtcactctgcttaaaatggcttttacccaaaagataggcaataacaaatgctggtgaggatgtagagaaaaaggaaccctcatgcactgttggtggtaatgtaagttagtataaccactatggagaacagtttagaggttcttcaataaactgaaagtaaacctaccatatgatccagcaatcctactgctaggtatatacccaaaagaaaggaaatgagtatcagagagatatctgcactcccatgtttattgcagcaccattcatgatagccaagatttggaagcaacctaagtgtccatcaacagacaagtgggtaaagaaaatgtggcacttaatacacaatggagtactattcagccataagaaaaaatgggatcccgtcattttcaacaacatggttggaactggaggttattatgttaaatgaaataagccaggcacaaaaagacaggcttcacatgttctcacttattggtgggatctgaaaatcaaaacatttgaactcatggagatagagagtagaatgatggttaccacaggctgggaagggtagtggagggtaggagttggaggatacacattgtgaatgggtaaaaaaaaaaaaaataaccgaaagaataaataagaccttgtatttgctagcacaacagggtgactatagttaataataatttaattgtacattttaaaataagtaagtatataattggattgtttttaacacaaaagaaaaatacttgaggtgatggatacctcattttccctgaatgagattatgcattgcatgtctatatcaatgtatctcatttaccccataaatatatgcatgttctatgtacccacagaaattgaaaacaaaacaagaaaacccacacttttaaaacagaaaagtgtttaaaatttaagtttcactacttattatttaagttgtgtaggtaacatttttctcatatctacaataaaaatattgtagaggttaaacataatatgtaaatttctggtacatagaaatattcaataagtgctattatttatttcttactgttactgtaagtactagtttttgctagtgttattattgtgacattttatactgttttatatcctttcaacaagattctgtgtattttaaggccagggaattttcttatagtttttctgttcttttagagcagactacaaagctgctcactctcccatttactgtttttgtgatgcttatcagatatccttttgatcttgtttttaactatatataattcttcctacgttattttaaacaacttgaacctgattctgtattatatatatcattatggttttatgtaattctccagttttcataagtgaagtaggaatactagatgttgtatctgattcatcaaaaattctgagtaagtgggatctcaattagtaataattttacttggttagaaatgaatataaaattagagtatcagaggttgatataatgggaaaataattagaaaggaagcagaaaggaaaatgtaaactcaaaaaagtaaagctaaaagtaggaggaacagaatatggataaatagcttagcacataaaaacatttgttttttcagcatcatgtaccttgaggtatagagaaaaataattaaaactttttaaaaattttgtgtttacaagcaaattgaatcatgtgttcattcctatatatctgtgtctacagtgtagataggagttagaaatggaaataatgatccattatctctatgttaattttgaaacgcaaaatccattggcttttgtattttgaaatggtttggtttgacatagatgtgtccaattctttgcacattttctacagtgtggacttgtataaagttgagattaattcaagaaagatttttagaaggtacagctttttgctttgactttttctaattaaggaggagtgcattttgtagtggaagttgttttttgcttatagattaccttaataaggtcattgacttcaaggaccatgttataccttcttcaaaatttatgaagtaatgttccataaggttgtgtcctgtaccttattaagagggatgtgccccattcttactaatagcttccttcttacccttatcagtgatgtttattatagaattgatagtgtactctttcagatttcagttaatagaaaaatgagtggatttaataaaaccttgggtaatatcacaagatttcagaaactatgcaatttaaataatctgtcaaatggtgaccaaagacactgagaagattaaaagtaaaaaataagcaggttagtatttgtgccgtataaaaagaaatttaataatcatcagctaaatatgtcagcaatataatgctgttagtttcaaagctaacatgaaattgtagtgtttactgaactttccaaatataaaagcccaattaatatacagtgttgggctaaatttctatactttagaaagatgaaaatattggggaatcctcaaataagcaataaaaacaggacttataacatgagctgattagactgtttcttagatggctggatgatacctggctagatggccacctcttaaaagaccatatgagacatcttctgttacattgatttctatttctatttctagatgcctgttacaaaacatagaaattatcttcctcccaaaattttatttttctactgtttcatatctcagatacatacattgtatattaataatgaatttccaatatgaaaaagacaaatttccacactttctaattgcaggcttttttaacacacttttttgatacaaggtctggctctttcacccaggttagagtgccatggcacaatctcagctcactgcaacctccacctcctgtgctcaagccacccttccacctcagcctcctgagtagctgagactacaggcatgcatcaccacatctggctaatttttgtatttttttgtagagataagagtttggccatgttccccaggctgatctcaaactcaggagctcaagccattcgctcacctctccctcccaaagtgctggaattacaggcttgagccactgcggccagccttaacacacttttaaaaggcatactatacagatatgcaagacaatgtcttgtttaatttattaaattagagactgtagtgtacacaacatgaatttggagagacttgtcagaaaggccaaaaaagctgggcgcagtggctcacgcctgtaatcccagcactttgggaggccgaggagggcagatcacgacgtcaggagttcgagaccagcctggccaacacggtgaaaccctgtctctactaaaaatacaaaaatagctgggcatggtggcaggcgcctgtaatcccagctacttgggaggctgaggcaggagaatcacttgaacctgggaggtagagcttgcagtgaaccgagattgcgccactgcactccagcctgggtgacagagcgagactccgtctcaaaaacaaacaaaaaaaagaccaaaaagactgttctttagtttgatcaattttatcagtaatacattttaacatccaatattataattaaaagacctctcaacaattattgattgcttgtttctctaagtattaataatttcctcagttatgatttctataaaattgcatttgaaatcttgaattggtatttaattttgaacttctttaaagccaccataaatgttctttaatattatgctaaaaaaaaatcaatagacaaggtgttttaaatcatttgtccaaattttatattgaccatatgttacataagaaaaaaaacagtttcaattaatttagtctttcagtatataactgtgctgacactgtgccatgccaagtgctgcttacagaattgagattctttcaataaataacatttattcctttcccaaaggacttcatactatgatacggtaaataaatgtgaaaatgactacttataagtctaggagacaagtatacatactattatgttagcacagagcaagaagtttagggggtttcaattttcttgtgtgtggtagcaaaaagaagagatagcattctggaaaggtttcataaaaggaagatacttgatgaatttgaagtttgagtaggaatttcattggtgagaataggtaaagacattcttaggacagggaacaaagaagaggactgaagtaaaagagtgtaaaatgggatgataaaatatccactaatcaaatctgatctgtcgggtaggaaagagagatggaaagctaaagaagragctgaaacagtacactgtatattggttactaaagtttgatagaacagtggtttatttttcttcaaagtgtttattttaggcttagaattagaaatagctcttattagtttacttctttgttactgtgtttctctttattttgtagagtkttaagctttacacttcaaagtagtaattgatttttggttggcataaatatcacatgtacactttcttctccacaaattttgggaaaaatcctaagtygtaagaaactaatccatttaaaagccaattgtagaaatgcatatttactgaatctttgaattgcctttccggaagttaaaagtttctatgttcaatagcaacttgaattgttctttgaaaaaaaaaaagttattattactatacgctaatagaacttaaaatattttgtattttaaagttttttctaaaatatatatacactcatgagactctaaaatgctttacctcttatagatcagtaaaagaatgctcaatttaatcaagataccctgtttttttaaacttagttctattgacttgttacctgcagatatatttaagatataataaatttaattactttctgacttaaatgaatatttcttattatcgtttgtactatcaaattatcaccagaaacattgttattgagttgacaaactatcaatacatgggaacatttaaaaataacatactgattatgcaactcaggattggctgttgagattatctaagattattaaaattattctaaggttcagaatcttagagtattaattgtatggaaaaagatggaggaattagaaagaaatctgttgattagcatttcagccatattggaaaacaagtttataacttgcaggacaggtatatcttaggctattgaggagaaaggcagcttcaggccagtgaggaaccaggtagactatatttggccaatgaaactttggcacattaaacatactcttgtagtgttttggaagatgtggttgctacaagtcggaaaggtaaagataagaggagatatcatataaatctgggaaattaggagaaagtttccccaattttctgtttacctgtatatctttctaaatcttttgagggaaagaatcgtatgttcttcactgtgatgtccccaacatttaatatagtaccacatatagctagattgactgtacaactaaattgggatgtttctgagagtttaaaggggcactgtaccagatgctgggtctacagatgccaactgggactctctcaggcaaactaggagataagttcatactacacatatatattcagtaactcttggaaggagaaagaggaagacagacatacaaagtctaaagtccagttgtcaaaggtggggtataaaactcttctttcccaccaaactgtaacaatgagagcgagagaatatgcaatttcactccaaaagttatgtatttagaaaggtagtgcattgtattaggttggtgcaaaagcagttgtgtttttttccattacttttaatatatgtgcagcttagtgcacatctttgcttaatgactttaatgatatttggagattgtagtatatacagtcttgggatttttaagaatatcttgtatcatgtgactgaggagatttttcctgaaacagtaaatgtcctacctacctttactagaaatattattatgataactattaagtgggctcatctgtagattctttttttagctagagcaagatatgtgagaaggaaagaaagtggttcacaaatgtagctctaaagattacttttctctttcctttctcttcttttgaaccccttctttccacttagttataaaagttggtgcttgttttttgtgcctttactagataggccaaattttacagcagaaaactttgtaatgggaagtaattcaggttcatttgcattaaaataaccctgcttttgagtgcagtgagtcaacattatcaccaaatggtttggtttgggcacattcttagttgacaacagatacataactcccaacctatctatatttatcatcttcatgatagactagtagtctgatggaaaacaacaaatagttatggaattgagaataccatttctgatgtgtgagctgaggaaaacatttgttttaaatcccacccatcatctttcatcttcttatcctagctaaaagagtcaaagctgaaaaacttttcggaagggaaaaataaggatacctatatgtagggctttctgaaattttgtctctgcatatattttttggaaaacagatggcttatttataaacagttgcacaaaaatatgatagtgtcatataaaattcttacaataaatttattggggattgtcatgttaatatatataacaagccattttaaaggagagaaacaaaaatttttaatacagagcaattagaagggaagatgacaatttattttcattttatatttcattggaaaaattaaaagttataaggttttacaaatataaaatgaagaaaatttatattagatagattttatactgtaatataataaacttcacttgaagcttaaatgggaaatttaataagaaccttaatttatttgtttaaataataccatttacctctatataggtcatgtgtaggttagaaaacactatttttgaagttaagactctagattcatatccttattatatagtataaatcacaattacagattttttttaacttttagattcagggtacatgtacagatttgttatatatgtaaattgcatgtcatggggatttggtgtacagattatttcatcacccaggtaataagcatagtaccagacaggtaggttttcaatcatctctctcctctcaccttcctccctcaagcggtcctggagtctgttattcccttctttgtgtccatgtcaattacagagctttaacaatattttaatgtctccttaaaaagagtcaagattctatgattccattgaatcctttgttttattctgtttttcttttttttttgtaactactcttgaattctttgatttgcaaatcaaaaggcatatatttattttgatattttaaaaatttacaccaaggggcttttaaaagcttttttgaaataactgagaatattacatagtgcagatttcatcagctgtcacatgtgctccctttagagacagaactttgtaaatataacaggccatattgttatctcatttgaaagcctgtcctgagcaaccaaaacttatgctagttttacaaattatatttgcatatatgaagtgatatataacatataacttttaataatacataaaataaatttatatattttatgtctgtgtgtgtgtgtatatatatgtatatgcagttataacatataaatccaatcatcagtgttggccaggcacagtggctcatgcctgcaatcccagcactttgggaggccaagccgggcagatcacctgaggtcaggagttcgagaccagcctggcaaacagggtgaaaccccgtctctactaaaaatacaaaaattagctgggtgtggtggcaggacagtgttttcatgatggattagatttcttcagcagatccttaattagccatgtaattttacatagtaattatttttatcagactcaaataagaatgatatttaataaactggagcatagctgtggaaaattgcctgaggtgtgaatttctgttttaaaatgaagcatgctttttagaagttaataactgtatgctttcattgatatatagttgaatgcttgtaattgttgatgtyacatatctctggcttctgagtaaattggaattacaaacacaccaccactaattggaaggagaaattaaaaagttaaagaaaagttaaacccagaagttccctgggcccttcagatatattttgggtcttcactttgatctataactcttgaaactgatgtaaattgtaccttttttgtgcagagaggaaaaggtgagacaatggacggatagaatgcattttgtggcagtagaattaacatcaagtcaagaaaaagtattacttgagtatctttttttttttaaatccagcatgggtaaaagttcacattaaatgaggaattcagctttgtcatggaatacagcacctcatctttttttctttttgccctgaagctcttctgtgtaggatatgtgacatgtaagatgtttgcttatagggaaatatctattgtatttatccattttcatgctgctgataaagacatgcccgatactggaaaaaaaaagagaggtttaattggacttacatttccacatggctggggaagccccagaatgatggcaggaggcaaaaggcacttcttacatggcagcggcaggagaagatgaggaagaagcaaaagcagaaacccctgaagaacccgtcagatctcgtgagacttattcactattatgagaatagcacgggcaagagcagctcccatgattcaattaccacaccccggtccctcccacaacatgtgggaattctggaagatacaattcaagttgagatttgggtggggacacagccaaaccatgttatctataaaattcatgtgatcattggaagcaaaggattatttgagaaaagtaagggaagactacttgtactgatggactgtcaataatttagtactatttgttcaaatattaaaagctaaaaactttaaaaatttaacaaataacaaggcagacattattttttgaagattattttcaccaaataatcggttttaaaaatagatgttactttactgtaggagaaagttgtgattatgaagggaaaagttttatgatgttattgtcatttcaatttcaaaaaaatgaggttgtcacctgtaatctcagcactttgggtggccaatacaggaggattgcttgagcccaggagtttgagaccagcctagacaacatagcaaaacccagtctatatttaaaaaaaaaaaagttgagctcattgaaatatgtattaatcttggttttttaattagtaaaaatataatagttacttgcccttgagtagattgttagcactatcttgtttagattagtgcatagtgagtaaactggcaagaatrgtaactttggaagaatgaaaaaaatgaacatattcctcatatttcaactgaactctatgaattctaatagaattagaatcaacaaaatatatttttaattgcctaccgtatctctactttctgattaaacatggtattcttatgtctttttttatacttttaatttttatttttatttattttttatttttttatttttttattattatactttaagttttagggtacatgtgcacattgtgcgggttagttacatacgtatacatgtgccatgctggtgtgctgcacccactaactcgtcatctagcattaggtatatctcccagtgctatccctccccmctccccccaccccacaacagkccccagagtgtgatgttccccttcctgtgtccatgtgatctcattgttcaattcccacctatgagtgagaatatgcggtgtttggttttttgttcttgtgatagtttactgagaatgatgatttccaatttcatccatgtccctacaaaggacatgaactcatcattatttatggctgcatagtattccatggtgtatatgtgccacattttcttaatccagtctatcattgttagacatttgggttggttccaagtctttgctatcgtgaataatgccacaataaacatatgtgtgcatgtgtctttatagcagcatgatttatagtcctttgggtatatacccagtaatgggatggctgggtcaaatggtatttctagttctagatccctgaggaatcgccacactgacttccacaatggttgaactagtttacagtcccaccaacagtgtaaaagtgttcctatttctccacatcctctccagcacctgttgtttcctgactttttaatgattgccattctaactggtgtgagatggtatctcattgtggttttgatttgcatttctctgatggccagtgatggtgagcattttttcatgtgttttttggctgcataaatgtcttcttttgagaagtgtctgttcatgtcctttgcccactttttgatggggttgtttgtttttttcttgtaaatttgtttgagttcattgtagattctggatattagccctttgtcagatgagtaggttgcgaatattttctcccatgttgtaggttgcctgttcactctgatggtagtttcttttgctgtgcagaagctctttagtttaattagatcccatttgtcaattttctcttttgttgccattgcttttggtgttttagacatgaagtccttgcccatgcgtatgtcctgaatggtattgcctaggttttcttctagggtttttatggttttaggtctaacgtttaagtctttaatccatcttgaattgatttttgtataaggtgtaaggaagggatccagtttcagctttctacatatggctagccagttttcccagcaccatttattaaatagggaatcctttccccattgcttgtttttctcaggtttgtgaaagatcagatagttgtagatatgcggcgttatttctgagggctctattctgttccattgatctatatctctgttttggtaccagtaccatgctgttttggttactgtagccttgtagtatagtttgaagtcaggtagcgtgatgcctccagctttgttcttttggcttaggattgacttggcgatgcgggctcttttttggttccatatgaactttaaagtagttttttccaattctgtgaagaaagtcattggtagctttatggggatagcattgaatctataaattaccttgggcagtatggccattttcacaatattgattcttcctacccatgagcatggaatgctcttccatttgtttgtatcctcttttatttcmttgagcagtggtttgtagttctccttgaagaggtccttcacatccccttgtaagttggattcctaggtattttattctctttgaagcaattgtgaatgggagttcactcatgatttggctctctgtttgtctgttgttggtgtataggaatgcttgtgatttttgcacattgattttgtatcctgagactttgctgaagttgcttatcagctaaaggagatttggggctgagacaatggggttttctagatatacaatcatgtcatctgcaaacagggacaatttgacttcctcttttcctaactgaatgccctttatttccttctcctgcctaattgccctggccagaacttccaacactatgttgaataggagtggtgagagaggtcatccctgtcttgtgccagttttcaaagggaatgcttccagtttttgcccattcagtatgatattggctgtgggtttctcatagatagctcttattattttgaagtatgtcccatcaatacctaatttattgagagtttttagcatgaagggttgttgaattttgtcaaaggccttttctgcatctattgagataatcatgtggtttttgtctttggctctgtttatatgctggattacatttattgatttgtgtatattgaaccagccttgcatcccagggatgaagcccacttgatcatggtggataagcattttgatgtgctgctggatttggtttggcagtattttattgaggatttttgcatcaatgttcatcaaggatattggtctaaaattctcttttttggttgtgtctctgcctggctttggtatcagaatgatgctggcctcataaaatgagttagggaggattccctctttttctattgattggaatagtttcagaaggaatggtaccagttcctccttgtacctctggtagaattcggctgtgaatccatctggtcctggactctttttggttggtaagctattgattattgccacaatctcagatcctgttattggtctattcagagattgaacttcttcctggtttagtcttgggagagtgtatgtgtcaaggaatttacccatttcttctaggttttctagtttatttgcatagaggtgtttgtagtattctctgatggtagtttgtatttctgtgggatcggtggtgatatcccctttatcattttttattgcgtctatttgattcttctctctttttttctttattattcttgctagcggtctatcaattttgttgatcctttcagaaaaccagctcctggattcagtaattttttgaagggttttttgtgtctctatttccttcagttctgctctgattttagttatttcttgccttctgctagcttttgaatgtgtttgctcttgcttttcttgttcttttaattgtgatgttagggtgtcaattttggatctttcctgctttctcttgtgggcatttagtgctataaatttccctctacacactgctttgaatgtgtcccagagattctggtatgttgtgtctttgttctcgttggtttcaaagaacatctttatttctgccttcatttcgttacgtacccagtagtcattcaggaggaggttgttcagtttccatgtagttgagtggttttgagtgagattcttaatcctgagttctagtttgattgcactgtggtctgagagatagtttgttataatttctgttcttttacatttgctgaggagagctttacttccaagtatgtggtcaattttggaataggtgtggtgtggtgctgaaaaaaatgtatattctgttgatttggggtggagagttctgtagatgtctattgggtccgcttggtgcagagctgagttcaattcctgggtatccttgttgactttctgtctcgttgatctgtctaatgttgacagtggggtgttaaagtctcccattattaatgtgtgggagtctaagtctctttgtaggtcactcaggacttgctttatgaatctgggtgctcctgtattgagtgcatatatatttaggatagttagctcttcttgttgaattgatccctttaccattatgttatggccttctttgtctcttttgatctttgctggtttaaagtctgttttatcagagactaggatcrcaacccctgcctttttttgttttccctttgcttggtagatcttcctccatccttttatttttrgcctatgtgtgtctctgcacgtgagattggtatcctgaatacagcacactgatgggtcttgactctttatccaatttgccagtctgtgtcttttaactggagcctttagtccatttacatttaaagttaatcgtgttatgtgtgaatttgatcctgtcattatgatgttagctggttattttgctccttagttgatgcagtttcttcgtagtctcgatggtcattacattttggcatgattttgcagcggctggtaccggttgttcctttccatgtttactgcttccttcaggagctcttttagggcaggcctggtggtgacaaaatctctcagcatttgcttgtctgtaaagtattttatttctccttcacttatgaagcttagtttggctggatatgaaattctaggttgaaaattcttttctttaagaatgttgaatattggcccccactctcttctggcttgtagggtttctgccgagagatccgctgttagtctgatgggcttccctttgagggtaacccgacctttctctctggctgcccttaacattttttccttcatttcaactttggtgaatctgactattatgtgtcttggagttgctcttctcaaagagtatctttgtggcattctctgtatttcctgaatctgaacgttggcctgccttgctagattggggaaattctcctggataatatcctgcagagtgttttccaacttggttccattctccccatcactttcaggtacaccaatcagacgtagatttggtcttttcacatagtcccatattgcttggaggctttgctcgtttctttttattcttttttctctaaactttccttctcacttcatttcattcatttcatcttccattgctgataccctttcttccagttgatcgcatcggctcctgacgcttctgcattcttcacatagttctcgagccttggttttcagctccatcagctcctttaagcacttctctgtattggttattctagttatacattcttctaaatttttttcaaagttttcaacttctttgcctttggtttgaatgtcctcccgtagctcagagtaatttgatcgtctgaagccttctctcagctcgtcaaagtcattctccgtccagctgtgttccgttgctggtgaggagccgcgttcctttggaggaggagaggcgctctgatttttagagtttccagtttttctgttctgttttttccccatctttgtggttttatctacttttggtctttgatgattgtgatgtacagatgggtttttggtgtggatgtcctttctgtttgttagttttccttctaacagacaggaccctcagctgcaggtctgttggagtaccctgccgtgtgaggtgtcagtgtgcccctgctggagggtgcctcccagttaggctgctcgggggtcaggggtcagggacccacttgagggggcagtctgctggttctcagacctccagctgcatgctgggagaaccactgctctcttcaaagctgtcagacagagacatttaagtctgcagaggttactgctgtctttttgtttgtctgtgccctgcccccagaggtggagcctacagaggcacgcaggcctccttgagctgtggtaggctccacccagttcgagcttccgggctgctttgtttacctaagcaagcctgggcaatggtgggcgcccctcccccagcctcgctgccgccttgcagtttgatctcagactgctgtgctagcaatcagggagactccgtggggtaggaccctctgagccaggtgcaggatataatctcgtggtgtgccgttttttaagcccgtcggaaaagcgcagtattcgggtgggagtgacccgattgtccaggtgccgtccgtcacccctttctttgattaggaaagggaactccctgaccccttgcgcttcccgagtgaggcaatgcctcgccctgctttggctcgcgcacggtgcgcgcacccacttgcctgcgcccactgtctgtcactccctagtgagatgaacccggtacctcaaatggaaatgcagaaatcacctgtcttctgcgtcgctcaggctgggagctgtagacctgagctgttcctattcggccatcttggttcctcccccggtattcttatttctaaatatgccaaattgctaagtcttagatggaaataaattagaactggaacagatgcctatatagaggcatatgttttatctgtatatataaacaaatttgagacattattattccatttgtgactgcttataaatgttctccttcatttaaggatctgctacactttctgaacattcaagaaatacaaagcagatttaatattaccagagaaaatgtgcttgtagagtttaacaggaaaacattatttatcatgtgtacaatttgtgactcaagaaatgaactgataactctgaaggcagaaaataggttatgacagtttgttggtgtgcttgtttaataattagcagtaagtaattaaaatagtaacaaaacaaaattatcacgtaaagtattctcatggagaaattaaatctcattcaatgtataaataaaactatatttgaatataatgttcttggagtactgtgtaaaaatgatgattgtctcaaactttgtaatttcagagtatctgactgtcttctctcagatgattgcatttcatgatccagagctgagtaatcatctcaatgagattggyttcattccagatgtaagtacttggtgcattaatagaacatgtggttaaaaaaaaaaagcagaaattattagcacagaagagtgtattttcttaatttttgttgtcatagtgcatatctgaacaagttactgctactaattgtagccttgtattagtaagtttgtggctactttccatatttccaccttaagtaatgaaaataagtcatttttcttagcatagttgatagttttgagaaaatcattagtgatagtgttgtattaaactgtgctgtgtaggcttttcacttggattttatgatattcaggcctgattttgaagatataggaagtctatacttaagtgaaagtaacttctgtgttttacttgatactactttgggagcttagatagattttgggttttcttttctctgtagtccacatcaagctaaaagtcagagttgaaaatcaaacgttagctgtagcgtgacttagcctgttttttatttgttgtttgtcacatagaatcaagccctttttaaaggctgttgaataaacatatatcaaaacatcacattgtatccaataaatgtatacaattattacttatcaattaaaaataacaaatgaaagtggagaggaaaataaattaataacaaaagttagctgcttggtgatggggatgcaagtggtagcgtgggtgcaaaggaaattgttttcttgttacatttgacattaaaaaawtttttttaacactgtgaatgtattattcattcaaaagttaagctgaaggcacctgacctcaagcaattataattttttaggaagatactttattaaaaattattgataaaaaaccaaaatgttcacattacatatcattaaagtaggaaatgtaatttataaaataatattatggtattatctcattttcataaaatagaatttagtgtatatgtgtatatacataggaaaagttgaaaggctatactctagaatattaattatgattatgtagggttacaggagttatgggtaccgagggggcttaagtgcaatttttaattgttttcatttaaggtgttttttttgtaatgttaaaaacttcctaaaactatattatgtgatcatgtttaatagaatactataaagcagtttcttaaaaactgtttattctcacaatgcatgggaagaaatacattttatattgagacctggggcacacagaattcgagtggtgttgtgtatgtgtgtatacaactaaaataagttttacaaaacaatgttttctgcctcctacatgtgatgyattgtgttatttttgaaaagtctacatttaataagatgattttataaacctaaatttgaaaaatacttatataaggaatttaaaaaatcaataaaaactgatttttaaaattaaagaataaaaataaaaggctgttggagtataatatcattataaatgtgaggtataatacaatatagatccaatcttatggctagagttgaagaagctgtcaaggagctgactgccaagttggtaatggtgttagatttttgagtaaaaaagaatattaagtatttaaaatttagactaaaaaagataattattttcaaaaaatttttgtaaaggcacctaattaaattgtgctcagcactgaacagaaacagaaaacatttatgtagacaagtatgtttggaaaccaggtgcggtggcttatgcttgaaaggctgaggcaggaggatcacttgaggctaggagtttgagaccaaaacaacatagcaacacttcatctctttaaaaaataatgtgtagaattataaagataatccaataaaaatccttagacatattcatgaacagagataatattaagaaaggaaacacacaaggacaaataactttagttaatcagaaaattgaattctgaatgagtatgatgtaagaaacaatgttgagttaaaaatattgttaaaacataattaatgtgaatacatattaaatgtttactgtgtaccaagcacttttccaccctctttaaatattatcactcatcaaatactacaagtttataaatctgtgtaaaaagttacttaaatatatataaatccactttgggaagggctaataataaggtgaaaataaaattctaaataataacgtgaaaggtaaaagtaggtgggaatcagttaaaatgtgttctaatgttttagcattatttagagggaatgctcattttatttagacattaagtcagggaacctttcagatctgagatttgattgtaccctccttgaaagcttataagttagcctattactgttttctggatacaggcagaaaatgcaagattcctgggccagagaccaaggacattatcactaacagtacagcaagcagcatgaacattagcatatttgtgttggtttctcttgctctcaaatcctatggaaacaacatcaaggacccagatgatacctgcatatgtagtggattacattacaagagagaaaccatgagcttaaggaattggattttttttttgccttccctttgttcaagagagagagcctgtctttttcttctaaggctattagtaaatctgtcttttgtctagaaggagattccatttctgctttccaaggctgttttttatacaaacatatttgaaaagatagtctagaacaaaggacagtaaatgtctctcctcacaagaaattcagaagttcaataatgcacattaaaattttaatttaatggtaatcctgaaaagaataaagagagaatatgtaacttctaaaccaatggaggggtgcaggatagaacaaagaaaagacatttaatcttataaaagcagaaagaacatagaaagaatgtaagctaattaaatggcttattaaaggagattttcagatatttttgaaaatctatcttgatagtacttataagagataaatataaaaacttaaagatattggccaaaggagattaaaaaaaagtcaggcaattaaccagaacaacattagtgatattaatagaagctagtaaaatacaagagagaacacaaaacagacccatccctgtatagaatttggtgatatatgacagagatgaccatacaatcaattagaaaagaaagcattgttgatggtcctgattgagtaactatgtggatgtggagggcagtgtaaatgaaagcctaacttcataccacacataaaaataaattctagatccattagaagacttaaatatggaatattatatttgtatttttttatctaagaaataattcttattaaggttacagaaagtataaaacataaatttaaaaagagaggattgaaattcaggagtagtacaaaaggggcttctattgtattggtcatattttattttggtttaaaaaattttagagtaaatgtggcaaaatgttaatgcttgttaaatctgagtggagagtacattggtgttaagtgtgctgctatgcagggtgagtgaattactcaataactaaataattgtgacataatatatttatttatgcttccctgttatgatctacacataaaattactggagcattattgcttaacttcttgtaaaaaagttctgcaattgtagtgttattaagaaagtaatattgatttgtatagtgacagaggattttttcagtgtcactttgccagcagagatcttcatggtgggcattgcccctgcccatgtctcacttggccctgggcttgccccactaggtaccctgcccacctggccaggcaggctgtgcttggcttgagctctggcccagatcctgcacttgctctgcggctgagccaggcatgccatgacctacttccaccttgggagccggcgtctggatgaggggaatgctgtgacacttgaacagaggtgggcatgtgaccccaaagccccaaagggggtgttacagcatgctaacagttctttcagtctcacatccacagcccaacaaatggaggtgtgtggtgcccagaggtcccttctcccattgtttggcaagcaggaggggtgtgctacagggttacagctttgtttgcacttgccgtttggtgggtcctgagttcttttcccatgtccaagaataaggttgtgctgacagctagcggttgagtgaggcaaagagttttactcagtaacaaaacagctctcagcagagaaggaagcctgagttggacagcacccttacctgaagttgggtagtcttcccaccacctaaaagtgggtagcccaaagtgtggctgagcctggggcttttatatgctcagaatgggagtgtatgtgctaattggtttgtgagtatgcaaaaaaagctaaaaaaaaaaaaaaaaggcaccactcaaagatggccacaacagtgtaaaaaactaattagggaagggtaggtatatgtaaaataggtgaatggtagggatcaatcagaggaaagtgtgccatacgggagaggttctcaatacattctgtagatatgtatgagacctgtatcttggttttcagaccttaaactgtctttggtttaagattggattacactggggacttgccccatctgcctagggatttttctgcctcctgctgctatcaatggtagtgtgattagtcttcagagacagttttaagtcatatgggatgggaagtaattctttgtgggataggaatatccagcacatggcaaatgctgagcatccctgacccccaaccactcattgccactagcaatcctctaatcatcattacaaaaaaatgcctctacactcatttctgagtaattaattcacatgtatttctgaatgtcctctagcaaacggttctgtcacttgttaagaattttagagtaaacagaaagaaatgaggggaaataatatatcttaacctgaagaagagtcccatctacaactgttttcttgtcacagagagtgggcaaagttattcaacaaagaaagctaaaatgttaataggaagactgttttttgaaatctttttctttgtgtttgttttttaattcagctgtttttcaagcctgtggataatataaaaatgatgaggccttttttaaattcaattttgtgaacagatttaatgtttcaatgtagacattattgacagtgagtacttatgggaggggcatgatgaaatggaggacttttaaaaacattttttaactctattaataacatattttagttgtattttattagtttgtgtatatagcattttttaaaaattctgaatggttgtctttaatgttctacctttaattattgaggtaactttctatgcctctaacaacaatacaagctagattcatcaagtaaaagagtgggtactttgataatgatttaccaaaccgagtttcctactcaagaactaaacctatcaaagtaagccctcattaatctttcatcattgaaattcaggcttccattgcagtagagattgtgatttctggcttttttccttttgctctgggtcacggaactctgaatactgagcactgctaaagcttgaatagttagaaatattgtacactgatgtgacgcctagattatacatttcatggtagttatgtgatttacatataaatagggtgaataatgtgtatttgataaaattggagacagggtgatatttatcatttttgtcttgatatgtgtttctgcttttaaaaatatagtaggcctcatttaaaatgagatcaggaaagtatgattcattcttaagggaactgttttcctgaaattctgtgaatagtattcagcttgcaaattatgaagagttgtcaggtaaccattaagagaaatgataaggagtgtatcagtactatatgtgccttttcaacctactgtcacagctaaagataaagctaacaaattccatgatatgctggtaaagccattgacatttaactacaatctgaaaggatgcttatactacttaaaagcttatcacaatcattttcaaaatttatattcagccgagtttaaactgctcagaaatatttatgtatttgttccttcatttgttctttatcttcattatgttgttacgtaaataaattttagattttagtctaaagagaatactgacaatgagcttttcagattttatcaagatgtaattacaggaaaaactaggaatatccaccttatttagaatatctcataataagagtcctactagcctgttatagtctctctgaagagtcctgtgatgtgtcctcttgtctggtagctgctatgtccccaacattagtacaaaccccattctactggcattggatccattaaggcctttgaatacaaatggcttattaaagtctctctctcgtagtgaagcttgattacctttcagaaagtgcccagattttagaaatcaaagtggctattaatagtatcagggatgataaaatgacatttttggtactttctagccaaaaaactatacacacaagttaaatatctagcaagttttccaattcagtaaatcctcatttgcattacccccacatctgtttctaatctaatgattccttatgctgtccagaaacaggtgaaaggaagtatggcataatggagcagttctaaaacattttgctctcagaacccctttatattctgaaaaattattgaggacctcaaagagtttttgtttacatgagttatagctatcgatatttatagagatttaaaatatatttatgtatttataattcatttaaaaataacaataacaaaaccattgcatgttaaccaaagtaacatatttttctgagaaatagttacatttttccccaaaaatgcaatagtggtattgttttacctttttataatcttttacatttttataatctttttacttgtttaactatatgaagaaaatgtgacctcacacagacacgttaatagtttctcagatagcggtagtttcttaaacttctcagagcagtggttttttttgttttttttgttgttttttttttgagacagagtctcactccatcactcaggctggaagtgcagtgatctcggctcactgcaacctctgcctcccgggttcaagcgattctcctgcctcagcctcccaagtaactgggattacaggtgtttgccaccatgcctggctaatttttttttttttttttttttttttttgtatttttagtggagagggcttcaccatgttggccaggctggtcttgaactcctgacttcaagtgatccacctgccttggcctcccaaagtgctgggattacaagcgtgatccactgtgcctggcctcattgtttcttaaagctagttgctatgtacagtctaaaaccatgtcagtgaacttctcatactctgttatactaaaatccatcactctatcttgcaatttagatggctcttttactcatacataattttgtagtgtcatgaatttgtcattgaaaaatattggttgctgagttacacagatcttccaactatgaagcatttcattatagaatatttttaaaatcacatttattaatatcacaacaggtcttctccaaaaagtgattaagtattgggaaccgaccaatttcacagtggcagatattagctttccaaaattttaatcttcgcctaaaagctctcattttttcttaaagtaactgtttcactttgtacatttaaaaaaatcattgtttgggccgggcgcggtggctcacgcgtgtaatcccagcactttgggaggccgaggcgggtggatcatgaggtcaggagatcgagaccatcctggctaacaaggtgaaaccccgtctctactaaaaatacaaaaaattagccgggcgcggtggcgggcgcctgtagtcccagctactcgggaggctgaggcaggagaatggcgtgaacccgggaagcggagcttgcagtgagccgagattgcgccactgcagtccgcagtccggcctgggcgacagagcgagactccgtctcaaaaaaaaaaaaaaaaaaaaaaaaatcattgtttgtctgtcattctttcaaataaacatagtatttcttgcagaaaccatcaatattagctcacagatgattacccaagtgctttacctctttgtacttcagtagatagcacaagtgctttacacttacttccattttatttcacaaattttaaaagagatatttaataaatttaataatttttactccttcacatgaccattattatacttcggtgcctgtgccttaaattgtgctaacatgccagcagttttatccaccagtggctttgcaccattagcataaatatcaatccagtaaaaagagcaaatcatcttagtattattacaaaaatagctttgaattggtggaccccgaagggacttaaggaccgccagggcctgtgaccaagatttaagaaagctggtgtagaggttaagtactcagacacttgtgccaaatggtccagggttctaaattctggctattccatatactaattacataatctatttttagctttagttttagttttttccctgcaaccctcttaccattgatgtagattataataaattctacctcataatgaagtttagagaatgcatataaactgttcaacacagctccaggcacactataattgttaaggggtattgttctttatttaatattactagagtttgatcatgttgcattatttcttttattagcatgattcatatttagaagaacattatattacaagctataatggatatattattttgctacatcagttaatgaatactctgtcagaggaggtatggtactaataacaataaagactttcaaggttgtctgaattgatgagattttctgccactttgaattttaatctttttaattgcttgattttaaggtacttctctatctcaacaaagtgctacataacatgttttatagtctttcttttacttaaagtaaattagaatgaattatgtttgaaaattttgaaaagttttttgtagtaatcaatgaaataattgaaatatattctggaataatagctcatctttcccaaaaatgataatgtagatctcagaaccattaaattatctgagtgattttcttgtaagttttcagtgtatagttcttttgttcaatattgtaagccaactaagaataaataataaaaggtatgtttatacagttagttattttttatttgtttctttttttatttagagaaatcatgacctgtaaaagatataactaatataatctttggtatatagaggaaaaaaattaaccatttactttttgggtccaagggatcttttacattatttttatatgtttaagtcattttgtgaataatttgcagaagtagaataaagcatagtaaaaaactgtattaaaatattaagaatttaaacacaacaaacccaaaattttatgtcatatattccttattttgaaagtatatatatatatatatatgtgaaaatatatatgtgtatatgtcctttgaacttactgctcagctgtcatacatgagcctgaaggatatccatcatataaatactgattccgtatttcaaatatgtctctcataggttctagctgatttctggttcttcttgcacttgcatggttataacacagtcatcaaaatgaaacactgacagagctcataacttggttgaagaacagctgtcttttattccataatttgaaaacattttcatttttagatttatgaacacaaattagaataaatttaatttttatttctatatcatctatttataattacattgcaaacacatacacttatagcatttatttgcttaaactgtatcaaaaattttggtgcacaaatatcataaaaaatcaaatattactctcatatatccttttagcaaagtaaaatggtccaggtttcttattgcaaaatattgtgtggtgaggcccttcacattgaatgactgactgaatgagaattccagacttatttattgtttactctgatagctgtgtttgaggaaattcacctaagagactgtcatctgagcactcacaatttgcaatatcacttgtgtgactaattttaccatttgacttgagttaaactgttgctatctttttgcattcatcttctgattagtccagtaattgtaaaacattttcccctgttatgaaacagttttctcttttctttttaataataaaggtggaaaatggaaaattctcaatctttagctgtgttcaatgcaaaacgtaaaaaaacaacaaaaaatctataatgatggtgtctctgtacatctttcatatcttcttgaaagatggtgcaatactatggctagcacaaaaagaaaaatgaaggatggcataatagtgatgatttattttagtactgtgctatccttgtagatgattccatcattcttctgttttcttattagtatttttaagcatagttgagaataattaattggtattgatgaaataattgttactgataaataaaatattttatacagtgcctaggagtctattctttttattttctgctcatgcctctcctaatttaaaaaaaaaaagtgtgtatcttttgttatatgacttaatgaggttacctcagaactttggcttgttaaaatacttttccattactgaagattctgggtgatcattgtaactcctatatttaagtttactaaatgccagatgttctagatccattaactaatcttcacaataatcctaaaggttcaaggagataactttatcaggtcgcaaagtgcagatttttacacattcttttctggaatgtctgtatatatgtttcctaatgtacatataaagaatcattgcaaaagcattaaactaatggtcaatatgtattacagagaaggcatataataatttaaatatgaaaatacttctgacttaagatagacaatatagtatgcttataaaggatgtggattaagaaaatcaatagaaagggactcctctttgtagtagtaaaacataattttctgcttttcaaaatcaagaaaattatcccccttcctttgtttttcctattgatggttctcccttcctttgtttttcctattgatggttctaaatttgacattaccagaccacatggaaggatctcatgaaatgctaaatatcactactcttgcttgatattgctagggggcagtatttacttagctgactgtgtagaatagcactacaccaaatcaattgtacataatttcatgatctggagaaaatacttagagtatgtatgatttcttttcattggatttcattttctattaaatcaggaaatagctaataatatctctaatattaaattgcttttctttttaatcaaaacccacctggtattcaaaattattgtatcttgatgtcttttttatatcaggctatattatgaagctgtgccaatatcctgagtaattatttaagatgaaaatatcaatattttaaacgggagaaatatagaaagaaaaaataatagacattactatctcacagagtacattacttatttattaatcttaattatccttaattggtaagagataactggttctggtaagcacctaggagctgttatatgttatattaaagatatttattcaacttgaactaattattacttttcaaatatcattagaataagctttgttttgcttattttaaataattttttataattattatcaaagtataggtatataacaaaatctcaagtttaatttttttaaatacatgccattatttaatatgaaggatttttccccaatattaagcaaggaaggactaactcattttctcattatttcatatttgttgaaaacttcttaagaaaatatataatctcatgactatttggatcttttaatttatcactttcattgattttcattgtgtttttcattcattctttcaacaaatatttgattgatcctttcaacaaatatttgtgtgcctattatgtgccagacatttttctatgccatggataatatatcagcaataaaataagagatagacaaaaatatctgacctcatattctagagtaaatagacaataatgaagataaatatattatatggtaggtagtggtaagttctaatttaaaaaaaaaagctaaagcagaggtatggatgttatgtgctcaggtaaagaagagattgaattttcattatttatttctgagacagggtcttgctctgtcacctaggctggagtgcagtggtgtgattatggctcattgcagtctcaacctcttgggctcaagtaatcctccctcctcagcctcccaagtagctgggaccacaggcatgcgccaccagacccatctactttttaaattttttgtagacatgaggtctccctatgttacccaggctggtcttggattcttggctcaagcagtcctcccgctttggcctcccaaagtgctgagattgtgggaatgagccactgcacctggccatgaattttgaaataagtaaggtaaccaagaaaacctcacagaaaagttgacttatgaataaatgctttaagaaagcaaaggaaagagcaaaccaagcgaaagcagcagcagttgctacagccctgatgtggaagcatatcagagatgtggaggagcagccagtagaccattgtaactagagcacagtgaacaagaagataaggtcaaataggtaatagagggccatattacatagttttgttgatcatcattaggactttggcttttattgttagaggtggaaagccactgatgcttttgagcagaggagtgatgtctcatgtaaagattttaacaaggtcattctggctgctatgctgagaaaaatcgaaggatgggcaagaatggaatctaggaaactagtcatggactattgcaatagtctaggcaagagataatgttggctcgaatcaagatattagcagtggaagtagtgggaagtttttatatgctgcatatcttttgaaggtagagccagcaggactactggtgacaaatatacagtgtgtgaggaagagaggagtcaagtacctgagcaattgaaaggggatagagttgcttctaactgagatttggaaactacttggaggtatagattttgaaggaagtctcagaagctcgttttaggatatgtgtatctgttagacatgcaagtggagaaaacaggcatttggatatacagtttcagaatttgtaggggaggtttagggatggagctgaaatagggtcctcaaactacacagttatttggagaaaaatagaaaagaaaagaaaaggtatctaagaactgaacctgggacactccaggttgagagtgagagagaggaagaggaaccaacaaaggagatggataaggagcaatcagaaagataagaacaaaactaggtgagtatggtgttttggaagccaagtggagggaaaaaaatgttctgaagaagtgggaatagtcaactttgtcaaatcctgctgattggtaaagaaagattgcaattgagaattggccattagatttaatgacatagaaattattgatgaccaaggtaagaacagtttcagtggtgaggtggaggcaagaacttgattagagtgggttgagagactatttaatgaatatctactgctcttattgtaagttccctgtagcctggaactatgctttgttcactgctatagcctatcacctaacacagatctggcatgtattaggcacttagtaaatattgaattaatgaataaatgagtaaaataacatttattcacaagaatcctatcattctcctgcagagaatatgataggaaaggccataagctcctgtaactttgctgccattaccttataccagaacttgtattgtcgtacttaatagtaaagcattttaggtatctgttcgtatgtctgactcttctgctagagtgggacacgtggcatttagcacaaagcatttcatattgaataaatgaacaaaagcaagcatgaatgaatgaaagagtgaatgaatatacccagaattaagtatagtacaagtatgttgtgataggtaattataatataaaaatgattaccatgattatatataatacaactatattatatatgatacaaagcatagtgggataggtatcataaaaaatatacaaaaagttttcacaggacaagtggcatttgaggcaggcttggaaaaatcttgtagagctttggattgatggaaatgatcaggaaggagcattcaaagaagaaaatgcaaagtgcatcgttaggaaagtagtgtgttcagatcatagtaaatctgccttctcaggaagtagaacatgtgtagggaagtggtaaggtgcaaagaaatttagagtttcttatactgatattaataataatactactttaaatttgcaggttgttactgtttacaaagcattttcacatatattatttccacatcacaccatctctatgacatagttaagacagacattagttttcctatttcaaaaacgaagatctgggattcacagaggttaactaacttgaccaaggcacgctatccagtaatcatcagagtcaaaactcagttgtatgttttctgactccaagtccttggctttttcactaattcacagtggccttaaatgcatgagtacaaaattgtacttaatttggtatgcagtgggaacatattgatgtggtggaacagaggaatgatgtcatcacagttgcatatttagaaaaatcaatttggctaaaggaaatattggaccaggtagaacctgaacaactatgaaacatttgcagtagtccatgaaagaagaatgagaaccaaaacaagattagttcagtatgaatggatagaaacagaagactgaagagaccttgtaaaaataatatctatcagacttacttttatacctaagatttttctacctaagtgactataataatggtgttggtagaaaaaagaggcagtttgggggtgaccatgagtgtgattgggtgcagttaagttacactgaaacaatttgatcctttcaaggcttgcttttaaggtttatttaatggggccagagcagcttggttttggagcataattttcctccattactaaagcaatgctcttctgactactctccctaatgccttgtttataacagttgtgggtgtttttttgttttgttttgttttgttttgttgttttcattctggttagtgaaaaaatgaactattcttggcattttatgatcttggcattttttcactctgatcatttgaagtggtttctgccctactttgtattatatatatatatatatatatatwcacacacacacacacacacacacactcagatatgttttctgtgtacacacacacacacacacacacacacacactcttcagtaattagcaaagatttgaggggaatcttcagcagacttctggagctttctctatgcatctctctctctggcagaatcttccaggacactctcctgaagagtatagccaccttgatctccccagatttcctactctgcatattcagcttaggacaaccaccaagctctttctgggttcttcctccctgtcagtggcctggaacttctttgcatgcagtaaattgggcaattttagggttcatttcatttgtttctcctctctcaggtaccactctctaagatgtacaaattgttgttttatatatttggtctgatttttaggtgtttcagttcaggaggtaaatctggttcctgttatgccaccttggtcagaagcagaattcttccatagatcttgatgaagctaattacaaagactagtataggagaaaggcactgttagctagttgctgaaataatttgaagaagattcttaatgacagttagctttcatcaaaaagggagaaggtaatattgatgtcgtgtctttaaaagagatgttgaataatagcaatgaaactaattttgctgactttattttttaatttaaatttaaatgaacaatttatgttttattgttttctacaacccttactcattacagtgaagtcatatacctttgtactttttcctttttccatttatattgtccctagaaaaatgtatctaaatgtcagcctataaaaaatgatgatatggtggagatgagtgggttttatttcacatgtagtacttagattttaatatacttataaagttcttgactgkcatcttgatagtataaatactcaattgagtgaaatgcaaagacaatatgcaccttttactcataaattcataattgctaggtgctgaaataatatttatttaaactaaccctgtaggtagtaaagaagtctttaatagcagcctgtattaactcataaagtgaaataaaattagtgctttttcagtaaattattgttgatttttgatacttgctattgacaaaggagatttttactctacttttataaattaaggatgatttgtcacttctaaaaccttctaaaatttgaaaatgtatatgtctatatgtgtgtatatagaacgatatatactatatatatagctatatatgtgtgtatgtatatatttctaggtagtaaacttaggagaataaatttgtcaaattattaataatggtaatattagatcttattacttttagtctgttatgaagcatcctgttaattaagtggtaacaaaaagcacatgcttcataataccttttattgagacattttgaacatttaaaaagtatctaattaattcttaaaaatacaattaagagtacctcaaaacttatgaggactgtattagggttctctagagaaacagaaccaataggagatatataaacatagatagaggagatttattatgagtaattggctcacacatttatggaggctgagatatcccacaatatgctgtttgaaagctggatacccaggaaagccagtggtataattgagagtctagaggtgtttgtaattctgattccaaaggtctgagaaccaggaagctggtgatacaaatcccagtctaaaggcaggggaagattagatgaaatgttccggctcaagcagtgaggtagaaaagaagaggcacattcctccttcctctacctttgttttgttcaggctctcagttgattacatgatacctacccacactggagaggacagtttactgagtccactgattcaaatgctgatcttatctggaaacaccatcacacacaaacacacacacacacacacacacacacacacacacacatttaaccagatacctaggtatcacctgatgcagtcaattaactaacacaaggatctttaaaatctcagaaatattctgtacaaacctgtaaagtaaaatatacccttgaaattagtataccagcattgcatttggattagccatggtcttgagtctatcctttggtgaaataaagacattctgtgaataatctttgccaaaagagtcatctacatttgtaatgtggatagtatcattatataagagtatttgtaataactgtaattacctatgttaaaagaaaaacctttgacaaattaaatttaacagagtttaattgaggaaagaccaattcataaattggcagcccccaagccagaagaggttcagacactccagcatagccacatggtggaagatttatggacagaaaaagaaaagtgacatacagaaaacaaaagtgaggtacagaaacagctagattggttacagctcagcatttgctacagtctgtttacacatccagttagatatgattcactatgtatggagaaatctttaggccgaacttaaaacatttaaggaggcagctttaggctaaacttaacactacattctcttttattttaaccaataaagtagaccaaaacatagaacttacatttaccatttagtttattggtaatcattctaattatctyttttatttcctttttatccattccctgtacccctttttccactcatagctctatgccatcccttggtttcttaccatgtttactcgtaagtatgacttcccccggtttttttgatattgtattagcaaaaggacagcccgatgcctccccatattttatatttacaataacattgagcagatttagtaagtatttttatgtgtttctaacataatagagttaggtagaaaagaatttcagttgttctgatccctgaatatcaaagtgagaattctrtaaaataaaaacctattgkacatttcatgatatttgtacaaactctgcccccctttgaaaaaaaattaactataatatttacataaagcttataagggcaactattacaatcaaatcaggcttaattttcagagattcttcagtaacttttattttttaaactaggattcctctagaaattaagcagattatgtgaatgcgtaatactttaatttgctacaaatattaataaagtggacatccttactaataaaatatggtttacatggtaactgtaataatatttgaagtagatatttatgcagtggcctggaagatatacatagtattgttaataagaaaaaggaagttacaaaaaataggaagttgctcataggatttttggtgggaatttattaaaacagttgtttagagaatataatagatacgttattttactgtacctaaaacaacactaaagttcatctagataaatctgtgagaataatataactggaaagttctgggaagaaatattatgaatggttaatagggttaaaaatattatctgtttgattatcaattttttaagatgccttaggaagctataaattttcaaagccaaataaacatttcataaaaagagtttggtagtattagctctgaagtaatagttttgaccataaggtaataattatagaactagtaaagtaagttgttattgttttaattgttattttggttttttaatttatttgtatttttatcgttttacagatgtatttccactacacaaaattttccacctctgggataccttactacttgggaattcctctttcccattctgtattggagtagcaattcttcagcagctgcgggaccggcttttggctaatggctttaatgagtgtattcttctcttctccgatttaccaggtatagatctaaataaatggagccattaaatgaaatttgactatgaaataatgacacattcttaagccattggcaaaaataaccatccaggccttcagcatctcttctgtttgggcctcatcatcctctctggattctttctctcatatactgcttcttctgctgacccagcattgtaaatacaaatctgggtcatacccgctcactgtgatttacttccatcttggtaatgctactaaatgggtaaaatgccaggaagktgggggcaatatcatatttgctcttttgcttaggacaggggctgtttctcttcagtgatggaaagtatagaaaggccacttgggaaggtgtttaagaatctgtgtttataaaaagatacaattcacaaaactttgttgcctcccagccaaagctgcttgctaacaattttacgatttgacaaaaggaaatactgccctcttgggaggacaaatcatctatgtcatgcaatgcaggagaatatgttaagctatatagagtattcacaagtaaggagtttgtaaacctaggagttgaatgcttaaatgtagaaatatggataactatagtctgagctttgaagctatgggtaaaaagatgaaattaatgtcgttacctaggatgtaactaaatctatatttttgcagaaacttcagtttttttaggtgaaaaaacttcacagtactttattgacagcatcccttgtgctgttctccatattttcaggcaggcccaagttactgctgataataaacacacttaaaattatcccagaatcaaatttgcctgaaaaccaaawaaaaaacaaaaggaaggtcccttaagattatgtctttattaattactctcaagaaaaataagaaacctactgccagccctcatttttatgtttaatggatgatctgtacttggtactttaccgcctctctgttgaaattttttatcatttgtgggaaaataataagaaaaataccttggatttatttaaaactttttattcccccttccctcaaaattgaaactattatcatcagctttctgacttatcaaattttaattaaagtgagttatttcttactatgaatgaatagtttaggtcatatttttttctgggagattatgaaaatcaagttatctatttttttgttttgaacagtaataaataagctagtttcgcaaactgggaatactgtttatattatgcagatgatttcttgtcatttccagcttgccaaagtaaacataagatgattgattaggattaaaatacattttctggccagttctaaaaatatatatattaggaatgctgattgtacattttcaaatcaagcaaatgtattgcctttccaattcaatacataaatgctcctgttaaacaytggtgaagcatctgtttttatactttatagggagattagtggcaactctgcttgtctgttaaaaaaytcatgcaactgtgtattttatggtcgactgacatatttctgtcttaattccataggaaaaattattctatgtctttaaaattgcctgctttgggtttactttacagatggtataagattagaataaagtttctcgattaattcaaaactgaaaggaattgtacagtattcttactaatgatcattcaagagatgttatcttgcttgttttaggccttaaaaatgaaattctggtaattttatcctttctagtcactatatcataacatctgtcaaaccttattaaacactcatgttgttcagagcatgctattcaaataggaatgaaatctatttagttgatgtagtgtcagctggtacaattgggtttctttgcttaattgctcttactgcaaattcatctttccatgaaataattaatctgttttgcttataaataggttatcctacatgcaaagacccaagatatttcatcttatattaataactcttaaattcagtcccagcatccctgctcctaacatctcaatgcattgatgataggtcctattaaagcacttaactggatgaacaggaatgacattttccacatattttcaaagctgcctagcttatctatgtcttcttcctttccatttacattaccacctcattcctgaacaaaatattatttattagtaatagtataaacttcaaataaataagttcaaatgttcacagtaggcacaaatttgatatttttaactgatgagcattctatctgttaaaagtatgtatgaataatactattttcattttatagcaagatattcagtgaaatacaagttcagtcatcccccggtatcgatgggggattggtttcaggactcccccagattctgtaatccacaaatgctcaagtccctttgcatgtaacctatgcacatccacctttatacttcagatcatctcgcgataacttctaatgcctaatacaatggaaatgctatgtaaatagttgttatactgtattgtttagggaataatgacaagaaaaaacgtcatgctcagtacagacacagacattcatttttattccccaaatatgttcactgagcaattggttaaatccatggatgcagaacccatagatatagagagctgactatttaagaaaattttgtatgtacttaaaagttcttcttaccaacctggctaacatggtgaaactctatctctactaaaaatacaacaaattagacgggcgtggtggcaggcgcctgtagtctcagctagttgggaggctgaggcaggagaatggcatgaacccaggaggcggagcttgcagtgagccgacatggcgcctctgcactccagcctgggcaacagagtgagactctgtctccataaaaaagaaaaaaaaaaaagttcttcttcttcatatgtttagattgaatgtgttctgcgtgtatttggataagtaggacaagaatctggtgacctctgattttattttcacacttatattttatgtagcatagaatttgagagaatttatttggtctcttaaaacaataaggctttgagtttacttgaagtaaaacttattttagtcagagatatagtgtaattgtgaagttttagctaaaacaaatgttcatattcatctaagcagcagttatattttcatgaaatgcttaaccaaagcaaagaaagcaggtatcaatgttgtggttcaatatcaccatcagatgagtggacagttgactactataacttttccattattcagtacttatcttaataaagcaaaagtgctgccaagtaaatttagttatactacatttatatccaaagtttttaaagtattttagagatgtttaagtatataaatgggaaacaatttgggttttcagtcaatagttttttattgtaatctagggataaatataaattaaatagggttactgtaagatttatgtgtaatctttccattataaacagtggcttagatttttgaaactataagacttaatcaaatagcttattatagccagtaggctactaatttgtgacctctttgttaaatagttatcatggtgatgaatactgcagaaaacaataggagtttaaaacagggagttaggcagtttttcttaagtaaatgatacctaagataatatttgaaattatttaagtgatattggggagtggggagtggaaagagaggaaaatcttgtagacagagggaataaaatgctcaaaggcctgaaacagctgaaggaagttggagcaaatgggaaagtggagaggagtggctagaaaagtgaatggagaggtagacaaagaaggatcatgcagcatcttgtaggccacattaaagatttttaaaaatatatttgttgagatattttttcagtatttttgaagtaatgaaataagtatttaaaataacatcaggtaccaaaatacgaatgctataattgatattaatatttgtagagctttctgatctctctacatttttttcaaggtgatctatcatgagtgaagcaaaggattcttaacataagtgctcccaatagttatccatcattttttctccctggcttatagccagatatgggatggagaaatgatttgtgaaagagtagagcaactgtagtacacagttgttcagtgaaagttttgtattgtcaagcctgtaagattgatgccactttacctgaagctgagaattaattattcccattttctgcttgtagctacatgatattcatgcatgtcatgcatgtctatttttctttttttttttttttttgagatggagtctcactctgtcacccaggctgaagtgcagtggcacaattttggctcactgcatgtctgtttctaagtacaccttggaattgcaaaaggacaatcaaaatggaaattaaatttggaggttttagcagtggtccttctctcccccacccatctgtaaaaattacatataaacattaaaatctggatggcatattaaagtcttgtgagtttaaarttagttaaggataagtgagaaagtagttaatttgtttatattggcatggtgtatagtcactgaaataaaactttatgaaaaattacttttaaaacctcaggttatgtcagtcttgtttgtggtggaaatactgcattattttatggaaaaggggaaaatttaaaaacagatattacaatacatcacctccaagctaataaatggtcatgaaaatagcagccaggagcatgactgatgaagactctgaaattgtaacgtgattctaggaagctgaaagaattcacataacactaacctaattgttgctcttgaagcatacaactaattttgcaacatgtaaatactttataaagtttaaaagaaatatttcgtacgtattgggaactgtaatgaaaaataatgttagaggtgatcagaatttttacttatcttgaaaatttagagtagatctgagttcttatacatcttaaacctggtcccaaattgtcaagaatctgataggaaggcctttctctatagcagagctgcttgttttatggttgataagggtttctggtttgtgaaaggattcctgctttctgaattttttgagcagtccaaaaattatcttatagtttagatcagtgttattaagcatattttgtttcaagataccaatgatggcattaggtttatatttgctttactattgaatgtttatatgtgccttagatttgcaaaacaaaatatatagagcatttttcacttttgaagtagattaaaagtaattaacctcaaaaacctttaaaagtcagaaactgtttaaaatatccctacatatactgctgatagatattgcaataagaatgtaaggaccaaaatgtattaaatttaagagagagatttaaggcatcaaaagaatataccttgaaataataagagccatctgtgagaaaccaacagccagcatgaggctgaatgggcaaaaactggatgcatattccccttgagaatttaaacaagacaagtatgcccactctcaccactcctattccacatagtactggaagtcctagttacaacagtcaggcaagataaagaaattaaaggcatccgaataggaagaaaagaaatcaaactgtctcttttcacaagtggtatgattttatgcctagaaatccccatagcctctgctcaagagctcctagatttgatgaaaactttagccaagttttaggataaaaaatcaatatatataaatcagtagcacttctgtacactgtgtccaagctgagagcccaatcaagaacacaatctcacttacaatagccaataaaaaaatacattacttaagagtacatctacccaaaggaggtgaaagatctctacaacgataactacaaaacactgcttaaagaaatcatagatggctgagcacagtggctcatgcctgtaatcccagcactttgggaggctgaagtgggcagatcacaaggtcaggagttcgagaccagcctgatcaatatgttgaaaccccatctctactaaaaatacaaaattagttgggcgtggtggcatgcgcctgtaattctggctactcaggaggctgaggcaagagaatagcttgaacctgggaagcagaggtttcagtgagccaagatagtgccactgcactccagcctgggcaacagagcaagactccatctcaraaaagaaaaaaaggaaaaaaaaaaatcatagatgacacaaacaaatggaaaaacattccatgctcatggatcagaagaatcaatgttgttaaaatggccatattgcccaaaggaatttatagattcagtgctattcctatcaaactaccaacaacatttatcacagaattagaaaaaaatattctaaaatttatatggaaccaaaaaagagcccgaatcaccaaagcaatcctaagcaaaaagaacaaagctggagacatcacactacccaatttcaaactctactacaaggatacagtaaacaaaacagcacggtactggtacaaaaacatacacatagatcaatggaatgggttagagaacgcagaattaaagccacacacctacagccatctaatcttcaacaaagttgacaaaaataagcartgaggaaaggattccctattcagtaaatggtgctgggatagctagctagctgtatgcagaagattgaaactggagcgcttcctttcatcatatatgaagattaactcgagagggaataaaggtttaaatataagaccacaaacaataagaatcctagaagaaaacttaggaaacaccaatctggacctgggccttgggaaagtatttatgactaagtcctcaagagcaattgcaattgcaacagaaacaaaaattgacaagtgggacctaattaagctctttaagcttctgcacagcaaaagaaactatcaacagagtaaacagacaacctacaaaatgggagaaaatatttgcagactatttatttgacaaaggtctactatccagagtcttaaaaacaacttaaaccaacaaggaaaacacaaatgacccctttaaaaatgtaaaaagtacatgaacagacacttctcaaaagaagacatctgtatggccaacaagcatatgaaaaaatgttcaacatcactaatcattagagaaatgcaaatcaaaaccacaatgagatactatctaataccagtcagaatggctatgattaaaaagccaacaaataacagatgctggtgatgttgcaaggaaaagggaacccttatacactgcctgcgggaatgtaaactagttcagccactgtcaaaagcactctggagatttctgaaagaacttaaaacagagcttccattcaacccaacaatcccattactaggcatatacccaaaggattataaatcattctgccataaagacacatgcatgtgtatgttcatcacaacactattcaaaaatagcaaaaacataaaatcaacctaaatgcccatcaatggtggactgcataaagaaaattgtgatacatatacaccatggaatactacacagtcataaaatgaatgagatcatgccctttgcagcaatatggatggagctggaagccattatctttaacatacttatgcaggaacagaaaatcaaataccacatgttctcacttataagtagaaactaaacattgagtgcacatggacacaacgaagagaacaatagacaccagggcctacttgaggatgaaagatgggaggaggaagaagatcgaaaaaatacctattgggttctatgctaattacctgggtaatgaaataatctatacaccaaacctctgcagcacgcaacctacccatataacacacccatacatgtactccttgaacctaaaattaaagttggaaaaacaagaatgaaagaaagggtgcttcctgaacccaggctgctgctcacaatgttgtgatccttttcctttctctaggtctcagtcttcccattaacatgtgagggtgttgttctagaatcatcatggaatcttttaaaaaatgtaagttcttgtcacaggaacaaatacagcatgattccacttatatgagccatctaaagcagaattatagaagcagaaatagaatgattaaacatgggtagtgggaaatgggaagttgttgttcagtgagtataaagttatacaagatataatttctagggatctgctgtacaacaattaatatacagttaatgatatggtgtgcacttaaaatttcgtggtaagagggtgaatctcatgttgtgttcttaccacacacatacactagacatatggacacatacacatagactagataggagaaaagagaaataatataccagagtatttatagaaataatataccagagtgtttatagcatagagggaatgactagaatatttttattacaagaaagcacatttaattacttaaaatttcaagccattttaatccttctgtgcaaattatcaatcatacgaaaactgcttattgaacttggaacaaggttctacttgccacaaaaatcaaagactcctgttttgttctgattcaccgtgaagtgtaaaagaaagagagaaaacgatggctgcaactgacctagtgctaaattttccaagctgctgcaaatacctgctctataggtagagtagatacagatactttgcatcaaagtatctacctactcaactgttaactcattaagacaactatgttaagaatagaaaacagtttacccatatatcagtaatgtattgcatttcctatttatttctcatttcattgtaggtattaaacaacagaaatgatagatgcttaggaaaatgtgccagtaattgcatgcacatataccagagttgaaaggctgggtgaattatatctggagcccggtaacatattgtaccatccttttctccttagacattaactaagaagattgtgttttaaaattatattcatttatttaaatatctgttgacttctaggagtgggtgtatctatatatataaaacacatgtatctctatatatgtatacgactagtcttattggtggtttattatttctttgtaccagaacagaatattcatgcataattatttaaagatgatccagtggtaatctgtaagtgtgactgatacttctaacttgggttatcttaattattaatacatagggtattactcccttgtcctggtaagtcacttgactgccttgtgtattagttctctaatattttcagttagataattcaacttcccttttagaatttctctatagaatctccagtggaatgtttagtgtatggaagtattccttatattttaatcaaggtgggtaatgggaacatattaggaaatgagtgagcatggtactgacaaagatagtgagttaagttttagatacatgcttaagatattacggggcagctagatttagaagctgaggcactgttagagatttttagtgacaaaatgacaagtataatttcaagatcttacttgtcagagtctaaagtttcctgtagtcagttaggctttggtgaagccctagtaagttaggctgtcataaaaatatttcacttattagggagaattataatgctcttggcatatttagaatggctctttttttcctcaatacctgctaggagcataaagggattttttgtgatcttgatgatgtttgaagcatgaatcagctaaatacatgagaaggatcataacaaggacaaataatgcaaaaatgttgtatagattactaatggtgtcagtgagactaaactgcagtaagtgggacttgtgaaaaatactatgtttggaacaaaaaagcaaagcaagattgtaattacttttggaaaacatccaataatgtttagcaataagaaaactcaccaactttctttagtgtttttgagatgtgaagcatacaaattgtgtgaactgctggtcaggaaattgtgtccactttctatgagacctatgtaagtttactcactgattacatgtttaataaatactatatgacaggcacagtattatgcactggggccataaaaataaataagacatagtgtagctctgtagtaggatggagagaaagcattggcagcttagaaaatagtataaggataacacagatatgtgaggctcatggctgtcttattgtaaataggatgttagtagaggataggttgagagagagaaacctgaagtggatgggctggggtggtggtactggtggtagtgataaaagttggtaaaataggtagaggaatggttatgggggccttgcatgatatgctgaggaaattggatattattttatatgcaattggaaagttttaagcacagaaatgacatgatcctatctatattttagaaaaatgattctggctgtagtatggaagatggattggccacctgaaatgctatgattctaagcagtagaaagagagcagctgtccagggataacttcaagaatgtggtaaaagagtattattgaatttagctctttaccaaaataaattatatgacaaagtcctgagagatttctaatattttagaattctctcttaagtaataacattctatgctgtattccttgaagtgtagttgatacttactactaacartccttaaacgtggatcagtgagttactcaaggttattaattctttgttggaagactaattctatgccatttctatccactataattttattttatgtcagtacattaagtagtgatagatgtgctgtcaacttgaaggtgtcagagtattgtccttagaccttaccttacagagagtgcttcataatatgcatattttattccctctactttcttctccactaataagataaggaactttataattttcagtcttcttctacagtgataatttcattgtgttattgttgggatagttcgatgtcataagacattataagacagaaccaatgacaaaaaccacatgattatctcaatagatgcagaaaaggccttcaacaaaattcaacagcctttcatgctaaaaactctcaataaactaggtactgatggaatgtatctcaacataataagagctatttgtgacggacccacagccaatatcatactgaacgggcaaaaactggaaggattccctttgaaaactggcacaggacaaggatgccctctctcaccactcctattcaacatagttttggactttctggccagggcagtcaggcaagagaaagaaataaagggtattcatataggaagagaggaagtcaaattgtctctgtttgcagatgacatgattgtatatttagaaaaccccatcatctcagccccgaatctccttaagctgataagcaactgcagcaaagtctcaggatacaaaatcaatgtgcaaaaatcacaagtatttctgtgcactaataacacataaacagagagccaaatcatgagtgaactcccattcacaattgctactaagagaataaaatacctaggaatccaacttacaagggatgtgaaggacctcttcaaagagaactacaaaccactgctcaaggaaataagaaaggacacaaaccaatggaaaaacattccatgctcatggataggaagaatcaatattgtgaaaatagccttactgcccaaagtaatttatagattcaatgctatccccatcaagctaccaatgactttcttttcagaattggaaaaaactactttaaacttcatatggaaccaaaaaagagcccacatagccaacacaatccttggcaagaagaacaaagctggaggcatcatgcttcctgacttcaaactctgctacaaggctatagtaaccaaaacagcatggtactgtacaaaaacagatatatagaccaatagaacagaacagaggcctcagaaataacaccacacatctacaatcatctgatctttaacaaacctgacacacacaagcaatggggaaaagattccctatttaataaatggtgttgggataactggctagccatatgcagaaaactgaaactggaccccgtccttacaccttatacaaaaatcaactcaagatggatcaaagacttaaacgtaagacctagaaccataaaaatcctacaagaaaacctgggcaataccattcaggacataggcatgggcaaagacttcatgtctaaaacaccaaaagcaatggcaacaaaagccaaaattgacaaatgggatctaattaaactaaagagcttctgcacagcaaaagaatctatcatcagagtgaacaggcaacctacagaatgggagaaaatttttgcaatctatccatctgacaaagggctaatatccagcatctataaagaacttaaacaaatttacaagaaaaaagccaagaaccccatcaaaaaatgggcaaaggatatgaacagacacttctcaaaagaagacatttatgcagccaacagacatatgaaaaaatgctcatcatcactggtcattagagaaatgcaaatcaaaaccacaatgagaccatctcacaccagttagaatggtgatcattaaaaagtcaagaaacaacagatgctggagaggttgtggaaaaataggaatgcttttacactgttggtgggagtgtaaattagttcagccattgtggcgattcctcaaggatctagaactagaaataccatttgacccagtaatcccattactgggtatatacccaaagaattataaatcattctacaaaaaagagacatgcacacatacgtttattgtggcactattcacaatagcaaagacttggaaccaacccaaatgtccatcaatgatagactggattaagaaattgtggcacatatataccatggaatactatgcagccataaaaaagatgagttcatgtcctttgcagggacatggatgaagctggaaaccatcattctcagcgaattatcacaagatagaaaaccaaatactgcatgttccccctcgtaagtgggagttgaacaatgaggacacatggacacagagaggggaacatcacacattggggcctgtgcggggtgggggctaggggaaggataacattaggagaaatacctaatgtaggtgacgggttgatgggtgctgcagaccaccatggcacatgtatacctgtgtaacaaaactgcacattctgcacatgtaacccagaacttaaagtataataaaaagaaggaggaaaaaaaacatactactagagaaaatcacctaaccacaaaggaagactttaagagaggataaaaggaagaaagtgtctacaaaacaagcaaatagcaagtaataaaataacagtagcaaattcttacctattattaataatcttgaatataaataggtttaatttatccaattaaattaattatccaataaaaagagctagaatggctgaattgatttaaaaaaaaagacacaactatatgctgtctacaagaaactctacctttgaagacatgcagagactaaaagtgaagggatgagagaagattcagaaactatagagagagctgaagcaactgtacatatatcagataaaatagattttaattcaataatagttttaaaaaagacaaaagaagtccattatatgatgataaaagtcaatatagcaagaggatataacaattatatatacacccaaccaactctggagcatcagaatataaaacaaatattaattaacctaaagagagagattgagtgcagtgttataatagaaggggactcagcaccccacttctagcaatacacaggtcatccagacagaaagtcaacacagaaacactggagttaaactgtactgtagaccaaatggacctaacagacatttacagaacgttccatccaacagctgcagaatacacatttttctcaaaagcacatggaacattctccaagatggaccctgtgttcacgaaacaagtcttaaattttcaaaaatcaaaattatatcaaatttatttttagatcacaatggaataaaattagaaatcattaagaaaaggaacattagaaactacagatttatggaaatcaaatgatgtgcttctgaatagcaaatgggtcaatgaagaaattataaaggaaattatagtattcctgtatttaacagaaaatgtgcaaatgaaaatggaaatataccaaaatatatgggatacagcaaaaacagttctaagagggtagtttattgcagtaaacacctgcatcagaaaagtagaaataattcaaataaagaacttaacaatgcacctcaaggaagtagaaaagcaggaacaaacaaaacattggtagaaggaaaaataataaagagcagaataaaaacgaatgaaattcaggctaagaaaacaatacaaaagatcaacaaaaggaaaagttggtttttgaaaagattagcaaaatcaataatcctttagctagactagcaaaaaagggactaggcccaaataaataaaatcttatgtaaactgagacattttactacagaatgcagacaaattatactacagaattacaaaggatcattagagactattatgaacaactatacactaacaagttggaaaaccatgaagagatgaataaatttctggacacatacagcttagcaggattgaaccatgaagaaatagaaaacctgaacagatcaacaattaataacaagataagcagctgtaataaaaaagtctcccatcaaagaaaagtccagcagtggatgcctatgttgctgaaagaactaatgcaaattctctcaaattcttaaaaaaaaaatgaagaggagaggatactttcaaactcattctaaataccaatatccctgatggacatagatgaaaaattctcaacaaaaatacaagcaactgaattcaacaacacgttaaaaaaatcattcaccatggtcaagggggattcatcccaggaattcagtgatgattcaacatatgcaaatcaataaacatgctacatcacttaacaggatcaagaacaaaayccatatgattctttcaatagatactagaaaagtatttgataaaattcaacattccttcatgataaaaattctcaaagaactgggtataagaggaccacacctcagaacaataaaggccatatgtgacaaccccacagctactacactgaatagggaaaaaccaacaggcttttttgtaaaatctagaagaaaaagatgcctcctttcactacttttattcaacagagtactggaaattctagacagagcaattaggcaacagaaaaaaaaattaacacattcaattggaaagaaagaactcaaattattctttttcacagatgacatgaccttatatttggaaaaccctcaagacttcaccaaaaaactgttagaacagatttgcgaattcagtaaattgggatacaaaatcaacatataaaaatcagtagcatttctttaaaccaacagtgaacaatctgaaaaagaaatcaaggaagcagttctgcttgaaatagctacaaataaaataaaatatgtaggaacaaatttaacaaaagaagtgagagatctccacaatgagaacaaacactaatgaaataaattatagagggcaataaaaaatgraaagatatcatgtgcttatagattagaagaattaataatgttaacatgttcatgctacccaaagtgatctacaggttcaatgtaatttctatcaaaataccaatgacactcttaacagaattcgaaaaaataatcctaaaatttttatggaaccacagaagaccccaagtagcaaaagcaatcttgagtaaagggaagaaaactagaggcctcacactaattcccaaatatactacagagctgtagtaaccaaaacagcattgtactgacataaaaacctgcacatagaccaatgaaatggaatagataactcagaaataaattcacacatttacagccaacttacttttgacacaggtgccaacaatatacattggggaaaagacaggttttttttaataaatggtgctgggaaaactgtatctccatatgcagactaatgaaactagacccctgtctctcaccatatgcaaaaattaaatcaaactttattaaagacttaaatgtaagacatgaaactactagaccacgttgtggaaatgtctcacaacattgatctactaggcaaggatttttgaggtcagaccrcaaaaacacaggcaaccaaagccaaagtagacaaatagaattacatcaagctaaaattcttcacagcaaaggaaacaatcaacagagtgaagaaacaacctacagaatgggaggaaatgtgcaaactcttcaaccaacaaaggattagtagccagagtacataaagaactcaaatgaatagccaaaaaacaatcctatttaaaaaacgggtagatgatctgaatagacatttctgaaaaggagacatagagacagatgtgatggtgtatacttgtagtcccaagtattcaggatgctgtgatataagatcacttgagcccagaagtttcaggcttgtcgtaggtcatagtctatgatcatgtctgtagtcattacactctaacctgggtaacttagtgagaccctgtatttaaaaaaaaaaaaaacacttaaaaatggccaacaagtatatgaaaaagtactcaatatcactaattatcagagaaatgcaaatcaaaaccccaatgaaattttatccaagtttaaaaggctattacgaagaagagaaaaataatagatggtgcagaaagtgggatgttagtacactgttagtgggaatgtaaattagtatagctactatgaaaaacagtatggaggttcctcaaaaaagtagaaatagaagcaccataagatccagcattcccactgctggatatatgtccaaaagaaaggaaatcaggatatcgcagagatgtctgcactctcatgtttattgcagcactattcacaatagccaacatacagaatcaacttaagtgtctatcaatgaatgaatgaataaagaaaacgtacataaaaacacaatgaattaccattcagcgataaaaggcaatgaaatcctgtcatttgcaacaacatggatgtaattggaggtcatcacattaagtgaaataagccaggcacagaaagactatgtcatattcacagtatcacatattctaactcatacttgggaaactaaataagttgaggttgagagtagattgatagttgctagaggctaagaagaatgggctgggggatggggatgaagagagaggttggttaatggatacaaaatacagttagaccgaaggaataagctctgttgttcaatagacagcacagtaggatgactatagttaacaataatttgttatatatttcaaaatagctagatttaaaatgttcccaacataagaaaataaatattcgaattggtagatgttctgattaccctgttttgatcattacacattgtatgcatatagcaaaatatcacatgtattccatatttaattaatacataaactatgtacaattttatgtattaatttaaaaataacagtaaagtagaaaaaccaagccatcttcatgttttgttcaagtctttataggcaaagtttggaccctagtcaaaaaagggctctaaggagcctggctagactttggttaaggagagcatctttgtcaatacccagaagttacttcagataacaaaaatatgacctattaaaccaaagtaaatatgttcagcttactcttagttatatgtagagcatgcacagccattgtaatgttgcccaatatcaaggaagtataatggagagaatttggtgtagaaagaggcagcattcttcattgttgtggttgaaatatttttactttgtcaaattttacaaaagtgaccattttaatggtaaatatggagaggcattctctggagtagtagagtcactgagtcttgagactcagagccaataggcatagcagagagcaggagtgagtgaatgtatatagttatacaggcccctccyatggtcatatctgggaaggctggcaaggatgagcttagaagatcagagaattatctggaaaaactcaatgttcccagaaggagaaatatcttacttaggagtcttctaacaaaataaccatgtccccaaattaccttatagttaatccaccagtcactaaccccagcccacataaaaaaaaaaaaaaaaaaattcaatctgatttttggtgctgttcttgtaaatatrtagaatcaaagatcacaaaatctctgaggaaagcttccaattaagatacagaatagtataaactgaaaaaataatwtattcagaaagataactatgagaaaattaactatgaaaaaacagaacttttaaacataacaatgaaaattgttgaaaatctggaaattgatttttttttcttttttttttttttgagagagtcttgctctgtagccaggctggagtacaagcgtgatacaggcgtgatcactgctcactgcagccttcacctcccaggttcaagcaattctcgtgtctcagcctcctaagtagctggggttacaggtgcactccaccacatttggctaatttttgtatttttgtttagtagagacagggtttcaccatgttggccaggctggtctcaaactcctggcctcaagtgatcctcctaccttggcctcccaaagtgctaggattataggcatgagccaccgtgcctggcctggaaattgaaattgatatagaaatgcaatgatgtttgtgatgaaaatgtaagatgataaaatttaggaaatctcacagagtatgaaacaaaaatacacgtggaaagtaagaacaaaatgacaaaattattagaaattaaattcaggaagttcaagattcttatagaatagaagatttaaaaagaaacaaattatcacaaacatcaaaaacatactttttgtgtaactgaaggactactcagggatccaccaaatgcccagcacaatgaagtatatgcgtaagtatatcaccatgaaatttcataatacagggatcctaaaacttaacagagaaacagaaaatcatgtacaaataatcctaaatcagaattttatcagacttctcagcagcagacattggagctctacctttaataactcagaagaaaaaaattcaaccctagaatgctgtatctggtcaaactatcagtcaagggcagattaatgatattcrttgaaggtttttgaatagtttacctcctgtgtactctttctttgtagctgctggataatgtgtttcatcaaaatgagaagtaaatatgaaagagtggtaaataatgtcttacccaaaaagttaggaatcaaatataggggatagcctaagagaattggataatggtaaagagaagttccaggacaatagctatgcaataaatttcagaaggaatttatagccattaaagtgagagaagagcaggctcaggaaagctgtcttttccatctatccttgcccaaatggttgtgtttatcatattgaaaatagttcagtatttctgaaagatctaatactaatgggtgccaatgaagaaattaatagatttagagaagttattttacccagagttgcaaaatacctcatggagctttaattcaaacctgggaaaccataatccatgttttattcacaatgcattgtctcaataattataatgcaaggttaaaaaacagtagtgccatgtaatgagagattactttgtaggagtaattgtgcattttaatgtacacttcacaaagtacttttgcattatattttgattatgataatgtgctttggaagggttttgagatgagaggtgacatgagtcaagtgaaatggaaaatgagatatctgttagaactaaccatcagggtagaatcgggatggatgccagtacatcatcaagattcactgtaaaccttttatggtgttgatgggatgtcttggaagcagataaaaataacttttccaatgccagtgattgaaggactgcactacaacctttactctagatcactgactcaccttcaaactttgctggtgacagatgtgtcaaattgatttgagccctgcaaatacaaaatctatggactgaaaccctttcctttggaaactaaactgtgttaagtagacagactttagatggttgagtattttctctcattagctgccaaatttttatcttaactatttgaattgaaagttttctaaaatgaattgtgctatctcttttttcttaaacaggctagagaaacctgtcttaaaccttgatttttcttctagtttgtgtttgtattttctttgtgaaataacaagttgatattgttagagagcttcactatattatccattgcccaaataaataggcccatgcctcaaagcttgtttcactctgttttatagtttttatattaggaatagcatatgaggtgatgaaatctgacctctttttgtagccatggaagtaatgagctgtgaagttggtaaacatcactaaggaatgcctaattgagtaactggtcttatcagactatcttttcatattccaaatctaagttaggaagtaacaaaagatgccttataaccttatagtaacttcagacttctactcatagtaacatacttaacaaatcacttaacttccttgtgtcttagtttctttgtctttagcagaaatagaaggtgggaagaagaattacgatacctgtctttaataaaatcattgtaagaattaaatggattaagtgaaagtatacaatacctgtcacataatagatggtcagtgttaccttctttttccctcttccagatttcttcaccttaccacagcagataactctaaatgattactcatgcactatccacagaatttacttaatgcctatttccttttccccttacaagcccttcatttcaaaaagagggggagaaaaaaagaacttaccactttctgacatgtaatatatttttctccattgcctgcctgagcccgacacttggacttttacagaggaaatgagaatatatgccatttgtacttttagaaatatggaaagataaaaactagtcagtgctaaactccatcacagtcaacttcttgaatttctccgcctttctgtgatctttctactttcgccatagaggactggctaacttctcatcaggactgttggcctcctaaagagatacagtctcatccaaaacacaaacaatatagagttgtagtaacctttctatgtatattacctctgcattaaagatgcttacatttcaaacatgagaaacaaaaggaaatctaatatgaaagtgtttctattttatcttttagtcaagtgcatttaaaccttacttgattaaactttaaaacctttcttcatttaactcaagagattattaaagaatggagaaatgctagttgggcatggtggatgatccctgtaaccctagaattttgggaggccgaggcaggtggattgcctgaggtcaggaattcaagaacagcctgggcaacatggcgaaaccccatgtctactaaaaatacaaaaaattagccgggtgttgtggcataggcctgtaatcccagcttctaggaaggctgaggcacgagaattgcttgaacctgggaggccaaggttgcagtgagccgtgattgcaccactgcactccagcctaggagacagaacaagactctatctcaaaaacaggaaaaaaaaaattgagaaatgctgaattgagattctgaaaaattttttctgataattttatatcttatttaatggcagtaaaactgtcagttcactttactagaattcattctgaatcagcaatcaacatcttctaaatcttttgtctacctattcccaaattgtattctccccctayaacttttgtttcacattggaaaagtggaaacatcagcataaatttggcagatttttaaataaggagatgtgttctattctgtggcatttaaataatgatactctgaaatatatacatatgtatatgtagataattccaagtaaaagacacacrtgaaaacataagtagatacatttacaaatatatataagcaaattataccaaatatttccatcaatccagtcataaatatgctgattaatatatacattgttttttttactgacattttttctaataacttatcatcttagccatatttagatatattcacttaggagagatggtgtttattacattaaaagagcaatctaaattctatacatttgcttttttaaaacatttctatctagaaattgacattgaacgctgtgtgagagaatctatcaacctgttttgttggactcctaaaagtgctacttacagacagcatgctcaacctccaaagccatcttctgacagcagtggaggcagaagttcggcaccttatttctctgctgagtgtccagatcctccaaagacagatctggtatgtatttgcggatttagtttacaaactctaaaaggagatggatgttaaaattaatataccctagtatctttattgttcttaatggtgtcatttatgtccttttaatgtagatattttctaacacatgatttgattcatagaaatattccagaaaaccattatatctatttggttatagagttaggaagattattttgacgtactcctccaggtagcaagttttgctttttttgtatgcatttgtagtatctgtttatatatcaattggttatatagtgagagattacagaagcaaagaaagaattaaaaaaatagaaaaagagttgttaatagagcaggaacttattgttggttgacagaagaaacagcatttgtaaaactatgccatgtaggtgtttcaacattatcattcttactaaacacagtttataaatatggtcaacaaagctttcagttataataattcatacatttcgaatattctaatattatcatagtatcataattatttccacgaaattgaatttctgttaatatgtatgtattgcttttcagatatggcactttctatgattttatttatgtccccaaatatatgggtacattcatttgttcatatatttccatcacaatcaaattatattaaggtcacttataaacatgaccctgcttatgattgaatacagagcaatttcaataattacaatctctgcctctagatatacagatgatagagagggaaacagctaaatgaatatatatatgaaagattataagatatttctaaaatatcctgagagagaaaagaataagaacccacacttataaataaatatttgcattatagttttccaaaagtagtagttgtcttctgcctgcctggaagaaagtaagttctcaaatactagaaatattcagctgaagatatttccatgtaatgaattttggtgagagaactaatttgtcagtaaatggtaaatgttgttctagatcagggatccccaacccccaggccacagactggtaccagtcacaggaaccaggccatacagcaggaggtgaatggcaggcacaccagcaaagctttatctgtatttacggccactgctcccttacttgcattaccacctgagcgctgcttcctgtcagattagcagcagcattacagtctcataggagcacaaatcctcttgtgaactgcgcatgtgagggatctaggttgcatattmcttatgagaatctaatgcctgatgatctgtcactatctcccattatccccagatgggaccattaagtagcaggaaaacaagctcagggctcccactgattgtacattatgaagagtcatgtaattatttcattatatattatgatgtaataataatagaaataaagtacacaataaatgtaatatgcttgaattatcccaaaaccatctgccacaccctgggtccatggaaaaattgtcttccatgaagacagtccttggtgccaaaaaagttgaggaacactgttctagatgacctgtaagatagcttgaaactttgaaattcagcagttctaaatacaaacttatttaatagtttctttgtttcaaattttgaattatatcctctttatagcagaaaaacatttgttaaaaagactgacttttccattttattgcctttgttcctttcacagattagttggttgtatttatgtgggttgatttcygaactctctattctttttcattgatgtttgtctgttcttttgccaatactatgctgttttgatttataatttgtcttgaagctcagaagtgtcagtcctccaactgttctttttaatactgtgttggttattctgagtctttgtttccaaataaactttaaaattagtttgttgatacctacaaaataacttgctgctattttgattgggattacattgaatctacatatcaatttgggaagaactgttgacaatacaggttgattgtctcttttcaaagatgcttgggamcaaaagtgcttcagatattttatttgttctgattttggaatatttgcattatacttactgattgagcattcctaatccaaaaatacaaaatccagattgctccaatgagcatttcctttgactatcatcttggtactcagaatgtttccgattttggaacattttggattatggattttggaactagagatattcaacctttattgagtctcctatccaggaaatggaatattttttcatttatctagttgttggatttctttcatcagatttttatagtttttctcatttagatcttatatatatatagttagacttatatctaagtatttgattttgaggaatgctgatgtaagtggtattattttttatttcaaattccatttgtacattgcaggtatacaggaaagcgtttgaccttttatattaacttcgagtcctgctaccttgctgtagttacttattagctccagttttttgctcagttccttcagattttctacatatatgatcacattatttgaaaaatggacagttttatttcttccttgccaattagtacacctcttattttctttgtttgtgttattgcattagatacaacatctaatataatgttaaaaagaaatggtgagaggacatccttaccttgttcctgatcttagcaggaaggcttctagggtgtcaccagaaagtattgtgtgagctgtaggtttttgtagatgttttttacaagttgagtaaggtctcttttattcccaatttgctgagagattttttatcatgaatgcatgttggattttgtagaatgtgtttcctgtatctatttgtatgatcatgtgaattttcttctttagcttgttggtgcaagaattacattaattaattttcatatgttaaaacagccttgcatgcctgggataaattctacttgttcatggtatataatttgttttatacattgttggatttgactttgataatattttgttgaggattttggtatctatgttcatgagagatactgttttcttgtaatgtctttgtctagttttagtatttagggtaatactggcctcatagaatgagttaggacatattcgttttgcttctgtcctctcaaagaaattgtagacagttggcataatttcttccttcagtctttaatagaatttaccagtgaattcatctgggtctgatactttctgtttggaaatgttcttaattattgattgaatttctttaatagatgcaggcctattcagattatctaattcttctcatataagttttgtcatattgtgtctttcaagccattttatccaggctatcaaatttatgggcatagaatggttcatagtattcctttgttatcattttattgtctatgggatctgtactgagatctctttcatttctgctatttgtaatttgaataatcttttttttcttagctggttaaaggcttattgattttattcatctttgcaaggagccagcttttggtgtcattgatctctttgatttactgttttcaatttcattgatttctgctctgatttttatttttcttctactcactttgaacttaatttgctgttctttttctagttttctaaggtggaagcttagatcattgattttagaacttcccttatttctaatatatacattcaaagctgtacattttcctctgagcattgtttttgatgcattccaccaattttgatgttgtgttttcatttccatttagttaatattttgacctatgtgttaattaaaggtgttctgtttcgtgtctaagtatgttggtattgattctctaagactaatagcttgtagcgaattcaaccaattgtatatatatataaatatatatatatacagttctatatatatatatacagttctatatatacagttctatatatatagttctctctctctctctctatatatatatatacagtgtgtatataatacacacacacacacccctatatatatgaataagtttatctctttctttcaagttattatgtttccaattgtttattgtctattgctttggacagaacctctagtttaagagtaggtagacttacttgttcccgagtttaatgaaaatgcttctaatttcatcatttaagtttgacgttttttatactctttattgagacaattattgtaccatcttttctgtatttgagtgtttatcatgaatgttaaattttatcaaatgcttattttgtattaatttgggattatttcatcttttattgtgataatgtattatattattacagtttcttatatttaatggtcattacattcctgagataaagtctacttggtcactaacaaaaagacatactggctatatttgatttgctagtttttaaaaaaatttatgcacctatgtttatagattagataagtctataattttcttttgctttttgtccttgtcaggctttggtcttaagattatattacctattgggtactgtggtcactacctggctgacaggaatcaccctaaacctcagcatcatacaatatacccttgtgacaaacctgcacatgtactcctaaatctaaaataaaagttgaaattattttttaaattttatttatttctcctgtctgctatttaatcattttctataaaaggaattacctcttttacataaattgaggaaacttgtctgaaaaaccacttctgtaagttcatgttgtttgaaaagtatttctatttagttaacatgtttattttctcaaaattttttctaaaagtacctattttgtttaattttttatgtttatagaattctgtacataaaatatttttratttttgttcttttttatctgaaatgtctacatttttaatattgtttatttgaaggttcaaatatattagtataatagaaagcagatacaaaaataatgtatgcatgctgtaaaaagaatatttattaaaattagcataatcagaattcaggttcatattatatattcttatgtctgagtcaaaaacagattttaaaagcggcttttataaactgagataaattgtactctattactagtagaatggaaggttaaaagtggatattagaagaaaaatcaattttactttcatttctgcatgcatctattgtatttattccctgaagcagagttttataatagaaaaagcatgagctttgctgttagatggacttggtttcaaatttcaagcctgttcctttttcttcatataatcttgaataattcacataacctctctagttccctatttgtaatcattagcatacttaaaataataccaccctggcagggttactttaataatgatatacgtaaagctcctaattcagtgtctagtacataataagcactccaaaagagtaaaaaatcattattacaagtttagtaattaacagttaattttttttactttgcagtctgcccaagaactttatgacagtcttctatatctaaataatctgtacaaaggacatgatgttctagtattctgtttttcctcagctatgttagctcattactatcactttacatttagaaaccactataaaaacagtgtggagagtaaggattagggaggctggcttttcaaagaaggaatctttctggcagttttacctcagtaaattcagtttaaaatttcactttgacctttacttcttagtcttaatactattttcatccctaaactaaagaattgccaaaataattatttcatctagtgccaaagtctttcccatcagttttctcttaaatagctaaaactgcttgagaattctgactgaagtttattaattgaagaaaataataagtaaagatatgtaatcttggttaatagattgaatgtttttgaacggaatgtattttgggaaaatctctacttaatctttgattttttaaaatctatttctttgttaaattttaatcacatatttatgactggtattacttacatgcagtatgtaaatgagcaataattattgttaagttctttgaatacctcattatgaatacatatactaacccaagattttattaawttaatttttttatttacataatgctaactgcttgtatatactattaccataaaaatgatagcatttattgcattaccttcagtttataaggtatgctttcagtatagattaaacatgagtttactgtagataaaatcttatttaaagcacatttttatacttttggttcaaatagtttccaaaattcaaatataaatgccagtctacaaagtttcatctcaataataacaacactactttttagattatgaacagtttaaaaataacaccacagtgctttatgattttcaggtacccagatacattatttttatctccccctaaacaaatctctgagatgtttgatccccattttagaggtaaagagactcagaaaccttacttaatacaagttaacttataaattgccattttatcagtactgtaaatgtgtttttcactcttatttattgaaacatatatattaatatatatcatatcctactgtacacttggcttttcaagcattttttaatttttctctatttctctagaaaatacattaacatatactcatgcaatcatctgcatacctactcttaaataagaagaaatctttttacagtaagtataaggaaaagtacaattatgtatccttttttttgctaacatattgagggtaaaatgttaacctaaaggagaactaaacactgtctgctgaaattatttagagcaatagatgcattgaaaacaaaaaggttagctttgcatctgttctttttactggttcaattcttctgccattatctaatgttctgtaggcaattttagagctattatgataggcacaattttagtgaaagatgaagactagaaaccctggcagctacatgtaggggtaaaatgtatcagccctctagaagttaagtagaagacattttatagaaaatcatatcttttgaaatttgtttttccatagtaatgtataatcttattctaccattggcccaaaaaataagcaaataataataataatccaacataagaaaataagggatagttggatttggggataggatatcaaaagaccttgatttcctggattaaaatatgaatttttctttctatattccaagtgtagagaagaagaaaggcaaacaaattcccagacagagattgatatggtttgactgtgttcccacccaaagtctgatcttgaattgtagtaattcccatgtgtcaaggacaggaccaggtggagtaattgaataataggggcaatttcccctatactgttctcataatagtgagtgagttctcataagatctgttgattttctaatggactttctcctttgcttggctctcattctctttcttgccaccaagtaaagaaggacatgtttgcttcccattctaccatgattgtaagtttcctgaagcctgccaagcattgctgaactgtgaaacctctttcctttataaattacccagtttggggtatgtctttatgagcagtatgagaacaaactaatatattaaataggtactggtacagttgggtgctgctataaggataccgaaaatgtggaagtgattttggaactggataacaggctgaggttggaacagtttggagggctcagaagaagacatgaaaatgtgggaaaatttggagcttcctagagacttggaatactcagaagacaggcagatgtgggaaaatttggaactccctagagacttattgaatggctttgaccaaaatgctgatagtgatatggatgatgaagtccaggctgagatggtctcagatggagatgaggaactttttgggaaytggagtaaaggtcacgcttgctatgctttagcaaagaaactggcagcattttgcccctgccctggaaatatgtggaactttgaacttgagagagatgatttagggtatctggcagaagaaatttccaagtggcaaagtgtccaagaggaagcagaccataaaagtttggaaaatttgcagcctgataatgtgaagaaaagaaaaacccatttcctggggagaaattcaagccagctgcagacatttgcataagtaatgaggagccaaatgctaatcaccaaagcaatggggaaaatgtctccagggcatgtcagagaccttcacagcagcctctcccatcataggcctggagacctaggacagaaaaatggtttcctaggctgctgctattctgtgcagtgtcagaacatgttcgcctgtgtcccagtgacttcagcttcagctgtggctgaaagaggccaaggcacagctcagacccttgcttctaagggtgtaaaccctaagccttgcagtttcccacatggtgtttggcctgttggtgcatagaagtcaaraatcgaggtttgagaacctccacctagatttcrgaggatgtatggaaatgcctggatatccaggcagaattttgctggagaggcagagccctaacagagaacctctgctaaggcagtgcagaagggaaatgttgggtcagaactcccacacagagtccccactggggcactgcctagtggagcagtgagaagagggccaccatcctccagaccccagaatggtagatccaccaacagcttgcactatgcatctggaaaagctgcagacagtcaacaccatcctatgaaagcagtggaaagtggggctatatcttgcaaagccacagaggcggggctgcccaaggccatgggtgcccatctcttgcatcagcatgacctggatgtgtgacatgaagtcaagggagatcattttggagctttaagatctggctgccctgctgaattttggacttgcatgaggcctgtagccctgttgttttggccaatttctcccaattggaatgggtatatttttctattgcctgtacccccattgtatctaggaagtaactaacttgcttttgattttacagtctcgtaggtagaagagactgctttgtctcagatgagactttggactgtggacttttgagttaaccctgaaataaggctttgggagactgtagaaaaggcataactgtggtttgaaatgtgaggacatgagatttgggagtggctgggatggaaacatgtaatctaacttttaaataaatggaatcatagcatttgtgttgtttcatgtttcatacttgcatcctacagttaccatggcttccggttattagctccagcccaaacttctctctttttttgcttagcaatatgtcttgaaagtcttcttacatacacacatacacacacacacacacacacacacacacagacacacctaattctggttaacaagctgcaaaccattccttggtacagaaatgttatcatggtagtaatacttaatattatttgtatatctcaaatgcaaatagctgagctaataatgtctccttagtttacaacacattacaattattggactgggtcagacactttctcctatttccttttacttctttctttctgccctgaccctcactccttggtctctctgcacaatcatttataaaacagtggtttgcaaatgttgatgtatattatcctctccaggaaagctaagaaaaaatgaggcccctcttgtttaaaagataggccctgagcctttgtgtttttagcttgttctccgtgaattctaatactggttgctctaatatagtttatataggtttctgaatatgtacaaacccttttaagttaaatatatatgcatttatktgtatttgtagggatcttttctaatttttttattgtgataaaaatacacacaacgtaaaatttaccaccttaaccattttaagtgtacagttagtggtattaaatacattcataatgttgtgcaaccatcaccaccatctatctccataactcttttcatcttgtaaaactgcacctctgtacccattccattgtaattccttattctcccctcctctccacaaccacaattctacttctgtctctatgattttgactactctaagtacctcatagagttggaatcatatagttttggtcagattttttttttcttcttaaggctaaataatacctattttgtatatataccacattttgtttatccrttcattcatcagtagacacttgggttactcccacattttagcgattgtaaacaatgctgctatgaacatgggtgtataaatatctcttcaagattctggtttcagttccttttggcatatatccaaaagtggaatttcaggatcatatgttatctatctttagttttttgaggaactgccatactgttttctacagcagctgtatcagtttacatttttaccaacagtgtgcaagggttggtttcagtttcttctcaaacttgcgaacacttttctattttgattttttttctttttttcttcttttttttgaataataaatgtgcagtggaatctcattgtagttttgatttatatttccctgatgattagtgatagtgagcatcttttcatgtacttcttagccatttgtatatcttctctggagaaatgccctattcaaggtcttttgagttgtttctttttttgttgagttttaggagttctctatatattctcaatattattctcatattaaatatatgatttgcaaatatttcattctgtaggttgccattttactctgttgagtgtcttttgatgcacaaaatattttatttcacaaagttcaatttgactgttttttctctgtcacctagggctttggtgtcatctcctagaaatcaagtgccaactccagtatcatgaagcttttgccctatgttttcttctaagagtcttaaagtttttggccatacatttaagtctttgatttattttgatttaatttttgtatatgttattaggtgagagttcagcttcattcttttgcatggagatatacagtttttccagaaacatctgctgaaaagactgttctttaccccactgaatggtcttagctacccttctcagaacttatttgaccatatataggagggtttatttctagctctagtctgttggtctatatgtctgtctgcctttatgccagtatcatactgttttattacaatagttttgaaataaattttgcaatcaggaagtctgagtcttctggctttgttctttcttttcaagattgttttgtctattttaggtctcttgagattccatatgaattttgggataggtctttctatttctgctaaaaacatcattgatactttgataagaatgtgttgaatctgtaggtggctttgagtaatattgatatcttaacaatattatatctttcaatccataaacgtggcttgtgttttcatttatttatgtctttctaaatttctttcagcattcttttgttgttttcattgcacaagtctttcacctccctggttaattcctaagtattttattccttttgatgctattgtaaatcaaattgtcttcattaattccttttctgattgttcattgttagtatatagaaatacaactgatttttgtctatttttttctgtatcctgctactttgttgaattccattattagttctaacagtgttttgtgtaatgtttagggtattttttagatataagatcacatcatctgcaaacagattatttacttcttacttttcagtggatggcttttctttttcttgcctaatttctccagctaggacttccagtactatgttgaaaatacatcccaaaagcaggcatccttgtttattcattatgtcagaggaaaagctctcagcctttcaccattgagcatgttttctgtgggtttttcatatatgacttttattgtgttgaggaagtttccttctattcctagttattaaatgtttttatcatgaaacagtttgattttgttctttttttggtatcaatttagatgatcatgtggttgttttttttttttctctccattctgttaatgtaatgtatcatatggattgattttcctgtggcgaaacatccttgcattctaggaataaatcccaattgatcatgctgtataattttaatatgcttttgaattcagtttgctactattttgttgaagattgttgtttcaatattcwtaagggacatttgtctttagtattccgtttttgcagtgtctttgtatggctttggaatcagggtaatgctgggcttacacaatgagttaggaagtattccaccctcttcagctttttagaaaagtttgagaaggatttgtgttctttagatatttggtagaattcaccagttaagccatcagatctaggacttttctttcttaggagattttttattactgattcaatttccctgctagtactagatctagttagattttttaactctttctgattttagtcttggtaagctttgtgtttctaagaacttaactacttcatttaggttagtagcttcatttttgactcctgccttaccttccaaatttagtcaatcaaaaacttttgtttattaatctgtatacttctctccaattctgctgacaatattttactcatgttcaccatgattacaggcatgtgctaccacacccggctaattttgtatttttagtagaagcagggttttaccatgttggccaggctggtctcgaactcctgacctcaggtgatccacaacctcccaaagtgctgggattatgggcatgagccaccacgcccggcctgttgtacaattttctgactggtctctctgcatccattctcatttatctttaatccatttttcagacttcagctaccataatcttttttaatcaaaatgtttaccaagactcttattattatactgacaataaaattcaaacttctaacatggtctaaaagtcccaatgtaatatttcccttgacaactttaccaagattttctgtcagtattgttccctctaatttttctatgctgtagcacagaaattagatttcgttcagttttaggtataccctatacatacttctgctttaaggcctctatgtctgccttcatcttctcttttaacataaattcctaaagatcaagaactgtatcatagattcttaaatgaaatgatagggagggggcaaagtaagatggccaaattgaagtcttcaccgagcatgtcttctgcacagacaccaatttaacaactgtctacacaagcaaagcaccttcataagaaccaaaaactagatgagcactcacagtacctggttttaacttcatgtcactgaaaaaggcactgaggagggtagaaacagtcttgaatcaccaataccaccccttgcccaccccccagcaggaattgtgacattgcattgaactcagtgatatcctgttacagcagaatgcaaaaccaggctgcacttagctaatgcccaccctcagagaagatatttaaaccaactctagccagaggggaattgcccatcccagtggtccaaacttcagttctggcaagccttatcaccctgggctaaagtgttctggggctctaaataaacttcaaaggcagtgtaggccacaaggactgcaactcttggggagtcctagtgcttaacttagattaaagtgagtggactaaggaggcacgtaacctgttgagacacagccagagtggctaagagagtacttgcaccacccctaccccaaacccaggctgcacagcatggggctccaaaaaagacaccttctttccacttaaggagaggagggagaagaataaagaggtctctgtcttacatcttggaaaccagctcatccacagtaggatagaataccagtcagagtcatgaatccccctttccaggacctagctcccagacatttctagacacaccctgggccagaagggaacctgctgccttgaagggaaggactcagtcctggcaggacccatcaactactgaataaagtgcccttgggccctgaataaccagtagaaatacccaggtagtatgccactctgagacttgctggcttcaggtgaaactcagcacattactagctatgatggctatggggagagactatgattgagaacattagagggaaaagtaagggagctttgtcttacaccttaggtaccaactcagccacagggaagtagagtaccaagcaggctcttgtggcccccaattccaggacttggctcttggacagcatttctggacctgccgtgggccaaagggaaactacactgaagagtgagtcccaggccaggcagcattcaccacaagctcgatgaagagctcctgggccttaagagaacatcagcagtagcctagcaatactctccatgggtttgtgatggtggtcatagggtgaggcccttctgcctatggaaagcagagggaagaatgggaaatactgtgtctcatgatttgagtgccagcttagccacagtacaatagaacactaggcacacttctaaggtttttgacataagtccctggctcgcagatggcacctctggacctgcctggaggaacttctgccctgaagggaaggaaaaaccctggctggctttaccacctaatgattgtacagtcccaggaccttgagtgaacacaggcagtagccatgatagtagttatgacagcaagccttgggcgagacccagtgctatgctggctttcagtctgattcagtgtggtaccagtggtggtggccacaaagatgcttgtgtcacaccaccccaagctctaggtggctcagaatagagagaaagaggctctatttttttttaggagaaagtaaggggaaagaacaacagtctctgcagagaattctggatcttatctaagaccatgaacgcagtacctctacaagtctgcaagaacaatagtgttactgggtttggggtgtccgttaatacagatatagcttagatcacaacactcaagtcttctgagtacctgaaaagccttgcaggaaatacaggttcaaattagcccagactgtgaagactacaataaatacctaactcttcaatgtccagacacagatgaacatccacacacattaagatcatccaggaaagcatgacctcactaaatgaactaaataagccaccagggaccaatcctggagaaacggagatatgtgaccttttagactcgaaattcaaactagctgttttaggaaactcaaagaaattcaagatgacacagagaaggaattcagaattctaccagataaatttcataagagattgaaataattaaagagaaacaagcaggaattctatacttgaaaaagtgcaattggcatactgaagaatgcatcacagtcctctaatagaatgtatcaagcagaaggagttagtgagcttgaagacaggccgtttgaaaatacacagtcagaggagacaaaagagaaaagaataaaaaacaatgaagcatacctatagggtctaggaaatagcttcaaaaggtcaaatctaagagttactggacttaaagaggagagagaaacacagatagggatagaaagttattacccctttgaataaaaaggatgttaatgagtgataattattacagagaacttcccaaatgtagagaaagatatcaatattcaagtacaagaagattatagaacatctagcacatttgattcaaagaagactacctcaaggcatttaataattaaactctgaaaggtcaaagataaagaaaggatcctaaaaggataaaagaaacaaataacatacaatggaactcttatatgtccggcagcagacttttcagtggaaacctcacaggtcatgagagagtggcatgacatatttaaagtgctgaaaaaaaaaaaaattttaccctagaatagtgtatcctccaaaaatgtcattaaaacatgaatgagaaataaaacttcccagacaaacaaaaagtgaaggatttcatcaataccagacctatcctacaagtgctaaaggcagtacttcaaacaaaaagaaaagacttttaatgagtaatagattatctgagggttaaaaaaaaaaactcactagtaatagtacacagaaaaacacagaatattatcacactgtgactctggtgtgtaaactactcttatactaactaggaagacaaaatgatgacccaatcacaaataatgtatttgcccattctcaaactgctataactgtaataaaatacctgagactgggtaatttataaagaaaagaaatttaattgactcacagttccactgtacaggaagcaaggcagcacctgtctgcctttgcggaggcctcaaggaaatttttctcatggcagaaggcaaagtgatagcaggcatcttacgtggcagaaacaggaataagagaggggggagatgctacatactttacacaagaactcactattgcgacgacaacaccaaggacggtggtgttaagccatgagaaatgactcccatgatccaatcacctctcaccaggccccacatccaatattgagaattacaatttgacatgagatttgggtggagagacatgtccaaatcatgtcaaataataactacaacaacatttcaagacattgacagtactttaagatataaacaggaaaaacaaaaagctaaaaagtaggggaactaagtgtagagttttaattttctttttgcttgttcatttgttctatgcaaacagtgttaatattatcagcttaaaataatggattataatatattatttgaaagcctcatggtaacgtcaaatcaaaaaacacaccacagatacataaaaaataaaaagaaattaaatcatatcacaatagaaaatccccttcactaaaaggaagacaggaaggaaggaaagaaggaagagaatatctcaaaacaaccagaaatcaaataacaaaatggcaggggtaagttcttatcaataatactgaaagtaaatggaataaactccttaatgaaaagatatagaatggttgaatggattaaaaaagcaagacctaatgatctgtttgttacctacaagaaacacacttcacctataaagacacatgttgactaaaaataaggggatggaaaaagatattgcatgccaatggaaaccaaaaaagagctggagtagctatatttacatcagacaaaatagaattcaaggaaaaaaaaaactctaagaagagacgaagaaagtcattatataatggtaaatgggtcagttcagcaagaggatatataagcagtgtaaacatatatgaattcagtactggagtacccaacttattagcactaaagagagagatggaacccatacaataaaacctggagacttcaacactcttgtttcagcactggatacatcttccagacagaaaatcatcaaagaagcattgaacttaacctgcattatagaccaaatggaccaaatttacagaacatttcattcaacagccacagaatacatattaatttcctcatcacatggattattctgagatagaccatatgttctctatccagagatagaccatatgtttaagacaaagcaaatcttaaaacattcagaaaatcgaaataatatcaagcatgttctctgaccacatggaataaaactagaaatcaattacaagagaaatttatgcaaacacatggaaattaaacagcatgctcttcaatgactagtaggtcaatgaagaaatcaagaaggaaattgaaaattatttggaaatgaattataatggcgacacaacataaaacctatgaagtacagcaaaaacagtactgagggaagttaatagctataagtgcctacatcaaaaaagaagaaaaacatcaaataaataacctaatgatgcatcttaaagaattagtaaaatgagcaaaccaaacccaaaattactagaagaaaagaataaggaaaagagcaaaaataaattaatttgaaatgaagaaaacagtacagaagatcaatgaaacaaagagttggtttttttgaaaagttaaacaaaattaacaaatgtttagccagactaaccaaaaaacgagaagatccaaataaayagagatttaaaaggagacattactactgttattgcagaaattcaaaggattagcagctgctgcgagcaactatatgccaataaattggaaaatctagaagaggtggacaaatgcctagatacatacaacctaccaagattgaaccatgatgaagtccaaaatctgaatagatcaacaacaagtaatgagagtgaagccataataaaaattctaccagcaaagaaatgacaggacccagtggcctcacgtcttaattctatcaaacatttaaagagaacgtgtaccaattctattcagactattctgaaaaatagtggagggaagatttccaaacttattctatgaggccagtattaccctgataccaaaaccagataaacacaaatcaaaaaaagaaaactgtaggccaatattacagatgaatgttgatgcaaaaattctcaaaaaaaatttagcaaaccaaatttaacaacacattgaaaagatcattcatcatgaccaagtgggatttatccctggaatgtaacgatggttcaatatatgcaaatcaattaatgtgttatgtcatatcaatagaataaggtacaaaaaccatatgaacatttcaattgatactggaaacacatttgataaaatttaacatctttttatgattaaaaaaccctcacaaaactgggtttagaaggaacatacctcaggacaataaaaaccatacatgacggaccataatgagcatgatgttgaatggggaaaaactgaaagcctttcctctaagatcaagaatgtaacaagcatggcccactttaactactgttattcatcacactactggaagtactagccagagcaattagacaaagagaaaaataaagggcatctagattagaaagaaagaagtcaaattatccttgtttgaagatgacatgatcttttatttggaaaaacctaaagactccataaaaaacagtattagaagtgataaattcagcaaagttgcagggtaaaaagcaacatatataaaaatcagaagcatttttatatgctaaccacaaacaatctgaagaagaaaccaggaaagtaatcccacttacaatagctacaaataaaacaaaatacttaggaattaaccaaagaagtgaaagacctctacagtgaaaactatgaaacattaatacaagaaattgaagaggatacaaaaaaaggaaagagattccatgttcatgggttgaaaaaattaatattgttaagatgtccatgcaacgcaaaacaatctacagatttaatgcaatccctattaaaatgctgatggcattcttcacagaaatagaagaaacaattctaaaattgtttagaattggttgttatatgcaaccacaaaagaccataaagaagaatgacattctgtcatttgcgacaacacagatggaactggaggacattattttcaataaaataagtcaagcacaaaaagacagactttgtgtgttctcacttatttgtgggtgataaaaattaaaataaattgaactcatggatatagagagtacaaggattgttaccagaggctgggaagggtagtgggggtggggtgtgtgttgagaattgggaatggttaattggtacaaaaaaatagttcaaaagaatgaataagacctagtatttgctggtgcacagggtgattataatcaaaagtaatgtaattgtacattttaaaataactagaagtgtataattagattttttgtaacacaaaggataaatgcttgagatgatggactcccattaacctggatggaattattattatgcattgcatgcttatatcaaaatatctcatgtaatgcataaatatatttacgtactatggactcacaaaaattaaaaaatgaaaaataaaaaataaaagttttgaaaagcaaacatacatacataaaaacctacctttctttcttcactggtaacttatgggtgcattaaggaaaggactgttcttatcattggaccctcagagcttaattcaaagctctgagaaatagtatgttctcaatatatttgtatttatttgatgtagttactacaaaaaaggttatactagtgttaactctcatttcaacaaagcattcagttaatttagtcacagttccttattcatcaactatgctagctctttctactttgtcttcatggcatggattataattacatacttatctttgtgtttcttttatcatttattccacatccaggcacaggggagagattggatcttgttcacccctgtacccccagtgcttatcttagcccctagcatatagttggtattgaataatttttttagtgaattaacagaaagttcattccagctaatgttttactctattttctgtaaagcaatgtatctgaaaaatggtcctcaaaaatcttctataatagttgttgaaagtgcatttttaggactcgatgcacacatcatatctactaaatcagtgattgaggggtatctcctgtaacttatgtttttactaaagtccctatgtgttgcttaacaacatgtgcatacagggttctcacaactcatatctttgtaactaaacaaatgattattcatatgggggaaaatatctcaataaggcattcatatttgtgatcatagtgttatttttgtgcttttgtgtgtatttttatactagtctacttgttttattgttattattctaaccttttgccgcaagttaactttttcttcatgaacaaaagcaacagcccttttcactattcaacaatctcagcctactcactctctaagcctctctttttatttttactgccaaagggcaactctcttttaattctgtctccctgactcccccactcttcttacgccattttgtgaaagcagtttctaaacaggaacaacagaatttctaaagtcattcatgtggaaataaattagagtgagaaatctatccaggactcaaaaaagttacattccctgctttatgttttctttcttgaaatcagtaaaaggtaaacccattacttcaacttagaagatatgcagtaaaggcacacttgagtttgttttgcttctcatcactgcactttcactgttattgctgttttatacaaattaaaagttggtagtacccttgtatcatgcaagtctaatggagccatttttctaacaatatgtgcccactttgtgtctttgtgtcatactttggtaattcttgcaatatttcaaactttttcattattattatatctgttacggtgatctgtgatcagtgstctttgatgttgctattgtacttgttttggtgcaccacaaacggagcccatttaaaatggcaaacttaagtgataaatatgtgcgttctcattgctcccccaaccagccattcctccatttttctccctcttcatgtgtctccctattccttgagaaacaaagatattgaaattagatcaattagtagccctataatggactcaaagtgttcaagtgaaaggaagaatcacacatctcttactttaaatcaaaagctagaaatgattaagcttagtgaggaaggcatgtcaaaagccaagatagcccaaaagctagacttcttctaccagttaggcaaattgtgatgcaaaggaaaaattcttaaaggaaattaaaaatgctactcgagtgaacaacagatgataagaaagcaaagcagacttcctgctgatatggagaaagttttagtggtctggatagaagattgagtcagccacaacattcccttaagccaaagcctaatccagagcaaagccctaactctctttggttctgtaaggccatgagagatcaggaaggtacagaagaaaagttggaagctagcagaggttggttcataagatttaagaaaagaactgtcttcaaaacgtaaaagtacagggtgaagcagcaagtactggtggagaagctgaaggaagtaatcccaaaatctagcaactatacagcagattttcaatgtagacgaagcagccttcagttggaagaagataccatctagggctttcatagctagagagaagagatcaatgcctggcttcaaggcttcaaagcttcaaaagataggctgactctcctgttaggggctgatatagatggtgactttcagttgaagctaatactcattgaccattccaaaatcctagggctcttaagaattatactaaatctactctgcctgtgttctataaatggaacaaccaagtctggatgacagcacacctgtttacagtgtggtttactaaatattttaagctcactatttagacctactgctcagggaaaaagatttctttcaaaatattactgctcattataacagtgcacctcatcacccaagagctctgatggatatgtacaggaaaataaatattgtcttcatgaatgataacataatatattggggaacctgccctgatagtcatgtaggttcttttctattttccctaagcgtcagctggtttgagaaataaagggacagagtacaaaagagagaaattttaaagctgggcatccgggggagacatcacatgtcgataggttccgtgatgccccacaagccgcaaaaccagcaagtttttattagggactttcaaaaggggagggagtgtgcgaataggtgtgggtcacagagatcacgtactccacaaggtaatagaatatcacaaggcaaatggaggcagggtgagatcacaggaccacaggactggggtgaaattaaaattgctaatgaagtttcgggcaccattgtcattgataacatcttatcaggagacaggttttgagagcaactggtctgaccaaaatttattaggtgggaatttcctcttgctaatatgcctgggagcgctatgggagactggggtatatttcacccctacagcctcgaccatagaagatggccacgcccaggggggccagttcagaggcccacccccaggcgcatgttctctttcccagggatgttccttgctgagaaaaagaattcagcaatatttctcccatttgcttttgaaagaagagaaatatgactctgttctgcctggctcactggtggtcagagtttaaggttatctctcttgtttcctaaacattgctgttatcctgttcttttttcaaggtgcccagatttcatattgtttaaacacacatgctctacaatttatgcagttaaygcaattatcacagggtcctgaggggacatacatcctcctcggcttaygagatgacaggattaagagattaaagtaaagacaggcataggaaatcacaagggtactgattggggaagtgataagtgtccatgaaatcttcacaatttatgtttagagattgcagtaaagacaggcataagaaattttgaaagtattaatttggggaactaataaatgtccatgaaatcttcacaatccacgttcttctgccatggcttcagccggtccctctgtttggggtccctgacttcccgcaacaataatatccattctccagtgcatggatgaagcaatcatttcaactttcaagtcttactttttaagaaatacattttgtaaggccatagctgccatagatagtgacttctctgatcaatctgggcaaagtaaattgaaatcccctggaaaggatccaccattctagatgcctttcagaacagttgtgattcatggaaggagatcacaatatcaatatgaaaaggtgtttgtaagaagttgattccaaccctcattgataactttgaggagttcaagacttcactgaggtagtgattgcagatgtggtagaaatagagaactagaattagaactggaatgtgagatgtgactgagtagctgtaatctcatggtaaaacttgaatggatgaggagttgcttcttaagaatgagcaaaaaaagtttcttagaatggaatctactcctggtacagatgctgtgagcattgttggaatgataacaatgcatttagaatattatgtaaacttatttgataaagcaacagcaaggtttgagaggagtgaatatggagagaagttcttttgtgggtgaaatgctatcaaatggcattgcatgctacagagaaatcttttgtgaaaggaagagtccattgatgcagcaaacttcactgttgtcttattttaagaagctgccgtagccacagccacctcagccttcagcaaccattactttgattagttaaaagtcctcaacattgaggcaagaccstccaccagcaaaaagattatgacttgctgggggcttagatgaccgttagcatattttagcaataaagtattttttaactattattttaggtttggggatacatgtgaagatttgttacatagataaacacgtgtcacaggggtttatacatattattacatcacccaggtattgagctcagtacccaatagttaccttttttgttcttctctctctttccactctccctcctcaagtagaccccagtgtctgtttccttctttgtgttcatatgttcttatcatttagctcccacttataagagaacatgcagtatttggttttctgtttctgcattagtttgctgaggataatagccttcagctccatccatgttcccataaaagacatgatctcattcttttttgtggctgcatagtattccatgtatatgtatatgtattacatgtatatgtatatgtatatgtattacatgtatatgtatatgtaccacattttctttatccagtctgtcattgatgggcacttaggctgattctaggtctttgctattatgaacagtgctgcagtgaacatttgcatgcatgtgtctttatggtagaacgatttatattcttctgggtatatactcagtaatgggatggctgggttgaatgggagctctgcttttagctctttgaggaatcaccctactgctttccacaatggttggactcatttttactcccacaaacagtgtgtaagtgttcccttttctctacaaccttrccagcatctgtttttttgactttttagtaatcgccattctgactggtgtgagatggtatctcattgtggttttgatttgcatttctctaatgatcagtgatattaagatttgcttcatatgcttattggctacatatgtgtcttgttttgaaaaatatctgttcatgtctataaggaacttaaacaaatttacaagagaaaaacaaccccattaaaaaagtgggcaaaggacatgaacagacacttctcaagagaagacatacattatcttcttctagatcatgttttcgcacatctaatagattatagtataaacaacttctatatgtactgggaaatcaaaaaaattaagtccctaattttactgcaatattcacttttttgtcatggtttaggactgaaccctccatatctccaaggtaggcttgttgtaattacatggtgttaatatgtgaatatgtgtgagcatgagtataaacacagttgttatatgccatggaaagcaccacaaattgaaatgttctttctcctgaaaacttaaaaatatgaacaagtttttttgttttgttttgtggtgttgctgtttctgagatggagtctcactgtctcaccaggctggagtgcagtggtgtgatcttggctcactgcaacctccacctcctgggttcaagcaattctcctgcctcagcctcacaagtagctgggactacaggctcacgcgaccactcccagctaatttttgtctttttagtagagacgaggtttcaccatgttggccaggatggtctcaatctcttgatttcctgatctgcccccctaggcctcccaaagtgctgggattacaggcataagccaccgcaccyggcctttttttttttttttttgacacggagtttcactcttgttgcccaggctggagtgcagtagcgatctcagctccctgcaacctccgcctcccagttcaagcgattttcctgcctcagccacctgagtagctgggattatgggcgtataccaccatgcctggctaattttgtatttttagtagagacggggtttctccatgatggtcaggctggtctcgaactcccaacctcaggtgatccacctgtctcggtctcccaaagtgctgggattacaggcgtgagccaccatgcccagcccaaaaaaatatgaacaagttagaggagaaatgtaaagaagcaagagaaaatattgcttgagattaaggaaaagccaaaagaaagataatcatttttttaaaaagaacagacttacttttccttttgtccctctcataattttaaaagaattttgacttaagttttattcattcagcatttmttgtacacctaccatgtgccaggcacttttcaacacttcagcttgtgaagggctttgcaattacagagaggtcttcagagaccccatttcatagtagcatggactgcatcttttccaattaccttggtaattgagggtacatgaggagaggtgtctgggaacatatcctcaattcagacaaaggagaataagttgagcaatgcccctgccatgccccctacaactgtgctgtttattttccagactcaacttactcaacttttattcgaaacagagctcttcaatttacagttaacaagatttttatcattttatatcaatttcctttcccacagtatatcagttccaaatttgggacataatttaattcaaacaccagaaagtaaaggcaggatttttaaaaaatgtattagattgtttggaagggtatactaagtcaatagttgtctgaaatcctttatggaaagaggcagagtataaataagtaagtgtaacacagtaacttaaggataagtctctatttcctggtccagaaactgttaattagcgatgcatggttaccatttcttttactcagtgattcttcatatgttaggttggtgcaagagtaattgcgggttttgcctttactttttttttttttttttagacagagtttcgctcttgttgcccgggatgaagtgcaatggcacagtctcggctcactgcaacctctgcctcctgggttcaagcgattctcctgcctcagcctcccgaatagctgggattgcaggtgtgcaccaccatgcccggctaattttgtatttttagtagagacgagctttcaccatgttggtcaagctggtcatgaactcctgacctcaggtggtccgcccgccttggcctcccaaagtgctgggattacaggggtgagccacggcacccggcctgcctttacttttaatgacaaagactgcagtccctcttgcaccaacctaaatatttctgattttaaaaatcaaattttttttcactgcagcagtctgaagcttagaaaatagaaaatttacatggtaatttgccactatatttaaagacatttactattttccttttttgtgacattatcttcgggaaatcataatttgtactcgtatagtaaaaatgttttcttcctctaagttatagaaatctctgggttttctcatcctaaatcatcaaatgagtaaatgccacttttctcaatgtagaaattgaagtatgcacaagtgtcttctgaattgagcagtgccctgtaagcacaacaagtgaaaaaggggcaggaaaaacacccagagccagataagagttgcactagagtatttctagaatatattgtattgaggaagatttggggttttttggtgggttgtggggaagaaaagaaagagatatttagaaatttggggtagaagaatgttgggatggatttcttgatgagaaacacaaaagaagaaaataaatatgaattattgttatcgttggtaaaaataacattgtcatgatataggatatagtatttcacttaggattgtcccaagctagtagctgaactgatttgaaacaaaggcacgcttcctacagacatcagggctatgccttgacacagtattaacatattcacattgcagttgctaggaaggttatgctggtgacagtttttatttctttgcagcctgacttaactcagtattgatttgagacagctcctgtagtgatgtttttccaccagaaagtctatagaatatattttcttcatgaagagtgatgggcacagatagggtaattctaacttgctaatgaagatctggggtcttgcactgagatcttccttatgcagccttaaagttcaaggatgtcatttcatgtatctctgacatccttggcatttaaagagaaatggattttggcacaattctacggaaaggctagcaacaacagacacagttgttatataaaggattcagtgagtctactgattttaaaatcctagtatgtaaatgccctgtttattccagcccttctctcaggatttcctataaaatgtgcaaaataaataggccatgttatatgagattcaaaaattacatataaacttactgctaaaaattcagtttgtcaacctgctttgtacaggtgctaacacagaatttaataaagcaaggtacataatgaaaaaggaaaaagaagcttttatctgcagcattgtcacatctgttagagaattactgctaaatgttgtttcatcctttgttctccaaaccaaaaatgagcaacttaaaaaccctgctaaactgaagtttttccaaaatacatctatctgaattatagattattgtttagatatcctacagaaattaactagaacacttagcaaagcgaagctaaatagtcctgacagatttgacttaattaacaaattttaaacttttatacttatcaaatggatatttgaattagttaataaaaataatctttattttcttggataacccattgattctaaatatggttttatgataaactagattcccacatgtattttgctatttctttgtccttttttcggttaaaatgatatttcttagtttattacttttctagtaccaagagttaagattataattataccatgtgtttggtgctgtgtttctacataaattgtagaattagctttcttttttctttatcccttgggaaaaattattttagtattgtgattgaattaaacttatagctaaatgaagaaaattaacctatggcatgattattttttccaaaaacagggtatgtctttccatttaaggtcctcctttttaggatcctctgtggaattttaaggttttctagataattcttttcagggttattactagatattttagccttttgttgttattattgggatatcttatttcattacattttatttgattgtttttgatacatagaaagattgttgatttcaccaacagtttgatatagtgattaaggacatagactcttaaacttttgaatcacagcactgccacaccagctgtgtaaccttgaacaattctcttgacttttctgtgcctgtttccttgttcataaaatggtgataataatattatatacttcagaggattattgggaggattgagttaatatatggagaatatttatatatactgctggtatatataaatactctgcaagttttcaccattaccattattactttttatcagccatattactgttctctcattatttgtaattatttttcatttgattcaaattttctatttatcatctacaaattataattttacctttttcaattttatacatcttatatctttctattatttaattgcttcacctttttctctagaacaatattaaataacaatggtaatggtggacatctttatcttacacttacattaaatggcagtgtttctattgttttgctgtctttttgcttgagagataaattttattatgtcataaaagtatcatgcattctgatttcttgagagttttatcatatatcttatcaacacactgtctggtattcaataggaactaaatataagccatgactatggattactgagctttgccattttagactattttgattttagagccagctttaaatctaggctctgtcctaatttctatttatgtggagggccttgatcctatcagaaactaccaaactttcggtttaagtcaagggtatatttaaagtctctgatcaccactgggtggagatattacagaaattcatagaatgagcaatcctgtgatttgagagggaattagaaaaaaaaaaaatttaactagacttgaaaaacaatgaaaccttactgaaaatttttcagccaaagttaaataataaatttcagttaaatttaaaactaagacattatttgtacctggattgtttggaaaggtgattgttgtttctagtgatacacaataataagtactcttaaattttctttcttgagaggctagtaccaacttgtggctttatattcccatttgtcatttgttggttaattcttgattatatgtagttttttttatttgtagcattattaccatttcaattaaagtagcctcatgtgttttaaccaataaatttatcatctggttttgcaatagaatagctattttattttatttatatgaaaaatgcctgtaaacacattcaaatatctctggcaatgtggccagaaatgcaaaagaacttaaactttttttaaataaaatatatgtgttgaaatgtatctgtacattttatagacactatagtattttaaagatttacttcaccacaataaatattgcccataactccatttatcaaatactttttcttgtcttagattaccttttattgcatattaaagtaaaccaacaggaagatatgaagaccttttttaatttaacaactgtaaaattgaatatatctacaataaatattattgtaattcatctattacaattcatctattatatacatctattacaattcacttattatatagctgataattttaattcattataactgctattatatttaacaggctttttgtacataaaataatttgttatattttcttgtagaaatcctgtacttgttcatgcccaatttgtgtttcagaatgtagaactttattcagagcttaaatgaataattagcttacccctgagatgcttttattttcaataagaaaatatgaaaaaatgtgtaccaaccaatttaatgttatagaaaggaaccattcaaatttatgagttcatattccataatatatgtcatactattacaaactcaaagtacatctctatgatctctggttttaaggttggctgtggcatgtacataacctttctgatctcataaaaatcagaattttttctcctatttaaaagaagtttgcagtattcacagctaaacacattgtagacattgatgcttctgtagctatattcttgtaagaatcatctgggatgatttgtggtgtgttaaaataaatgattaaagattagagacagctgaatactcttccttctcatttaaaatgttaaacagtcttttgtgtttattgctgaaacttttgaattttcctttatttgggacatcttaattgcattcaaatgtaaatggttggctgatgcatgatattagctgaatatttcccagaaatcaatcatggcaataacagttaatatcacaagtactttagagaccttgtttaccttgtatttggcacagcagtgagaatgaagagaggcagatctccagactttcttcctcagggaataagtgtctggccagagagtattttgatcatttagttgacatcctttggttatctagtgaggagagtgatgtgggggcaaggagaatattccaagtgacmaggaggaccagagcaaaaatgctagcactaatcactttagtatacaaggaagaggataagggtgagagtgaagggtaatatagtcagcagcccaattcaagattgtaccttggaaaattagagtttgagatgaaaacatcagttctactaactaaattactgtgacctcttgtcaccagctgactctactcactgaaactccagatcagtattgccattgaaacttgaccataacggtgctgtgtgaatagcatctctatcacatttcagaagaaaattatcaaaagttctaccttcagaagttatccagctaagtagggctgctctcattaactttttcatattgttcacctgagtgtaggaaacttacctggttctggttttattttaaataattatttctggatattaatagaaacgtatatcctagtagcaaagcaacaccaacaccaacaccaccctacattgccactttgaccctgtttttgccttataagtcagtgacactagagttcttcacttactgtaacctcttccacttaaactgtatgaaatatttcccaattatttgtcttttcaaataaacaagttcttattgatctaagattatataagcatgccatgttcatgaacaacacttaactgagtctcataattagaatcacttctgaatctccttaaatagaaactccagtggagtcattaagtattatgtattggtttttaacttttgtctcagaaagtaagcaagagttttgggaccttttgccagttgaatataaatttaaaaaataaggtaatagaattatatacttaatagaaaatacagtcatgcagcacataacaacatttcagtcaacaacggattacatacatgaccgtggtcccatgagattatgatagagcatatacagaaacctgatatatagcaattgatactggcattacagatcaactagaggaaataattgatattcagtaatggttctgcgacatttggttttccatattaaaaaatacatgaaataagtatatatgccatctttgtttgtgtaaatacaccctatgatgtttgcacaacacacttgcctaatgacacatttcttagaacatattccctttgttaagcaacacatgactgtacaaatactgtctactcctgcccatcatttgagaaaactgaggcccagagagataaaatgtctccagaatgataccgtatagcaaagaaaaaattactctctttacagaagcttagcttgtacacaatttttccagagtacatctgtgaacgttttagcataaagtctctaatcactgaaaaaaaaaatctgtctctacttttctttatatttcatattcatgtatgttgtctctcttctgtttgaggggaggagattctctctagtgtgagagctatactatgcagctttcagagtatgatagttatttcaaactccacatcagatgctgtatttctaaattttatgaatagaaacctcttcctatttaaaactaagagggagaaatgaaaacttgaaaatgtcactgaaacaatttattgttttaaatatatggatcaaaatgatatttgtagattgatagtttttgaaggtaacttttcttgttaaaattcctttgagagtgatagtctgtgccatttacaaagcctgtaccccctcttgcatgagcttgaaatacctaccactatgaaattagagtctgtttattgtaaacatttggaaaaatgagaattgattaatattaccctaaaaatctcaaatttatgtttttacaagtcttattaatattatacaatttaagatttttctcagcattatatagattgcctgccaaaattgagatatttgtcaattttttttcttttttctttaaattgtttatcctttctcataacctaaactgcaatttctatgctgatcattccaagaatatgatattctaaccatgacttcttccagatgccactttttatctctaaccacatctttgacagtgacaagtgtcactgtaccatctcagtttcacatatctagatttaaacatatcttccctttatctgccatctgtcactgttaatatctttttttctaatcaaccatgttcaaaacttaagagccattattcactcatccttgacctttaactcctgtatattttctctttctgtattttcctatacaggctctcatacatctatctttctttctttatcatttcattaatcyaaccaattttactgaatagctactgagttccaggctctctgctgggcaatggaggtatgaaaacaggagctcatggtatattgaaagagaccagtggcagtgatttatagagtaggggctataaacctgagaaactttgattggctatttgtgaactaagcttcaggaaattaggattcaaattaaaataggatgctgactgaactttctgcatcattcataccaggttaagttggtgggggagggggagaataaaaagactttaaatgagaggatttcttcagcatacctcctaaaggtagaaccagtgccttagaaatagaatcgaagtaccttcccaatttcacacagaatactatacttgaaaacccccagttatttatacggcaaactcctattcatcctttcaatctccactgaaatattaccttttcaaagaagcgttccccagttttccacttcttttctggccaaatgaactactcctcctgtatcatgacagaaaccaagttgcagtgagttcaggagacaatggtaaggagaaaatagagatgagaaggaggtagagaggtagtagcttgggagtgattcactccttgaagagtagttttattatttattgttttaatttaccttctgtttactgtagatggatggaattgcatgtatttatagaccaaggaaaaataacagaaaaggaaaaataacagtaaaggaaaaactgaataaaaaaaggagataaagaattgagcaaagctctcgattaccaatgccatcacttaatctagatattaataaaatacactttctagcaagtctttctccctttaatttttcccatttctatttcattcttggaaaaacagccaaattaatattcctaagatactgttattactatgtgacacattcctcgaaaaatcctgcagtacatatctgtaagtttgatctatatcctcagacttctctgtctttcagagatctcataatctggcacttgtctacctattcaatactattttctctgattctcaggatggatggtcaattcagtgagactagtctctccattgtcatttttacacccattgactttaacttttataagaacaagtatctttgttttgttaattgaaatatcccaagtaccgtgagtggtacctaataggtattcagtaactatttatcaaatttttctgcgctcctccagagcttttatagtaacccacttctacaacagtcttccttctcttttcttcttttccaaaccctacttggttttccttactcaagtgccacttactccaccaatatattactaactacttctgcccatattgtgtttcactctttccctgagttctcatagtatgcacctttggttccatacatggaatcttacaagagaggcagggtagtgatgtggttaagtgtacattctccagagccagactgaccaaatttgaatcctgattctgttactgttatattgcctttggcaggtttttaccttctctgcacctgaatttccttatctataatatgaataaaataatagaacctccctcaggattattgtaagacttaaatgagtaagtaaatgtatacaagtatacatttattatatataaaatatctatatattttctattattattgtatagttttattactaattcattcctgttagtcttgccttcccaactggattgtggagtctttgaggtagaaatgatatttcatctttctcaaaatggccagcacaggctagttcatcaactatttgtcaattaatgattacccaacatttagatgatattaagacgattttatcaggaaattaaacctgcttcatttgggatccaattttaataacattttatgtaaagatctacagtctaccaagcactttagattgactgtactggttgattctcacagtatttttgtgaggtaaatagaagagcagcatcattctcattttacagcttaggaaagaaaagtcaagaaggtaggtgcctaccacccactctgtcagtactaccatctctctccctacttctcacctgctcagagaggtacaaggtaaattaatgtcttctgctgaagtagacattccactgcaatgtagaatgtcacccatgccttattttaggtatgcccaaatctctacaatgattgtcctgggaactacacatttgccttgcaaggggagaatttgagtggctaaaaatgcccactactctaacctatagtttaggaatggaagtacatcgtatcttaaatactgtgttttccacaaagtcaattccccacttccccaaacctatctccttataaaggataggaggagaagggatgttggggtgacagtcagaagtagtagagtcactctgtcccttctcagttagtccttggacagattttgttggtagcttcacttatagcagactagcatagtatagccttttagggacaacatcactcagcatgcttttatacatacattcatttatcaaaccttttagcaccttctctgtgcaggatgctattataattaccacagaatatgcaaatgaaatataaggaatttaagctgttggtgtacctggctctctgtggtcattagcatgtttctattaatccagtttccctcctagaaacattatacgtcactttaaaaaaaaatctcagagttttacttttatacattgtcctcaaaacaaaaagtgtactgtcattatgttgaaacaaactatttagtacctagtcagctatttgaaagatgttacctgccttaccaatatgcctactttggctttttgttttgttttatttttttgtttttgtttttgtttgagacggaatctcactcttgttgcccaggctggagtgcagtggcatgatctgcattcactgcagcctccacctcccaggttcaagcaattctcctgcctcagcctcctgagtagctggtattacaggcacccaccaccatgcccggctaatttttgtagttttggtagagatggggtttcatgttggccagscttgtctcgawctcctgacttcaagtggccaaggcccacatcggcctcccaaagtgctgggattacaggcgtgagccatcacgaccagcctaaatattcttacatgtagccaatgggcccttttctctaaattctaaatatgttttgtgaaaatgtagataaacatcagtttatttaaaaatttcttcatgtaaatggtagagtaggccttaccaatgaaacatttcagtgaacctaaaacattttttattgacttgtgtatgttatcttttgtgtgttttccagccttgaatgcatgaaagcctgtcctatttaatgatctctttttatcatttttggactttttctgtgtattagtctgttctcaatctactaataaagatatacccaagactgagtaatttataaaggaaagaggtttaattgactcacagttccatttgctgggaaggcctcacagtcatggtggaaggtgaatgaggagcaaagtcacatcttacatatcagcaggcaaggggaactcccatttataaaaccatcagatctcatgagacttattcactaccatgagaacagtatgggggaaaggacccccatgattcaattatttccacctgaccccacccttcacacttggggattattacagttcaaggtgagatttgggtggggacacagccaaaccatatcattctgtccctggcccctcccaaatctcatgtcctcacatttcaaaaccaatcatgccttctcaacagtcccccaaagtcttaactcatttcagcattaactcaaaagtccacagtccaaagtctcatctgagacaaggcaagtcctttctgcttatgagcctgtaaaatcaaaagcaagttagtcatttcccaaatacagtgggggtacaggcattgggtaaatacacccattccaaaggggagaaattggccaaaacaagagggccacaggtctcatgcaagttcagactccaataaggcagtcattaaactttaagttccataatgatctcctttgactccatgtcttacatccaggtcacatgatacaagaggtgtgctcccatagccttgggcagctctgcccctctggcattgtagggtacagccccactcccagctgcttacatgagctagcattgagtgtctgtggcttttccaggctcacagtgcaagctctcagtggatctaccattctcagatttggaggactgtggccctcttctcacagctccattaggcagtgccctacagaggtcctccatgagagctctgccccagcagcaaacttttgcatggacgtccaggtgtctcaaacatcctctgaaatctargcagatatttctaaacctcaattcttgacttctgtgcacttctgtgcagcacaggcccaacactacatgtaagccaccaaggcttggggcttgcaccccctgaagcaaagccttgagctgtacattggccccctttagccagggctggagctgaagcagttgtgttgcagggcaccatgtcatgaggcttcatagagcagtggggccctgggccccacccacaaaaccattttttgctcctaggcctccaggcctgtgataggatgggctgccatgaaggtctcctacatgccctggagacattttccccattgtcttggtgattaacatttggttcctcattagttatgcaaatttctgcagctggcttgaatttcttcccagaaaattggtttttcttttatcacattgccaaccttcaaatttttcaaacttttttgctctgcttcctcttgaatgctttacaacttggaaatttcttccaccagataccctcaatcatctctatcaagttcaaagttccacagatctctagtgcaggggcaaatgctgccagtctcttttcatagcaagagtgatctttactccagtcccaagaagttcctcgtcaacatctgagactacctcagcctggaccttattgttcatatcactatcagcattttggtcaaagccattcataagtctctaggaagttccaaactttcccacctttttccatcttcttctgagccctccaaactgttccaacttctgtctgttactcagttccaaacttgcttccacatttttgggcatctttacagcagcaccacactctactggtaccaatttgctgtatttttatttatttattttttgagatggagttttgcttttgttgcccaggctggagtgcagtgatgcgatcttggctcgctgcaacctccgcctcctggattcaagcaattctcctgcctcagcctcccaagtagctgggattacaggcatgcgccaccatgcccagctaatttttgtctttttagtagagacggggtttctccatcttggtcaggctggtctcaaactcccaacctcaggtgatccgcccgccttggcctcccagagttctgggattacaggcatgagccacggcgcctggcctactgtattaatctcttttcatgctgctaataatgacatacccaaaactgggtaatttataaaggaaacatgtttaattgactgacagttccacatggctcgggaggcctgtcatggtggaaggcaaatgaggagcaaagtcatatcttacatggcggcaggcaagagcttgtgcaggggaactcccatttacaaacccatcagatctcgtgagacttactcactaccatgagaacagtatgggagaaaccacccccatgattcaattatctccacctggccctatctttgacatgtggggattactacagttcaaggtgagatttgggggggacccagctagtccatatcaatctgaatttaaagataatatttattatytttttaacatctctgcatgtttttcagtgccagatctattacctattataagtatagtcatgacttctcatttggaaagtctttttacattgctgtaaacatttcatcagaattatcttaaaacaattagattcatagttatgaagtatttaagagagtttaataatgctgattgaaaacaagttgcatatttttatgtttttaattattcaaaagtagctcatcattaatgaataaaacctaaacacagaaaatcaggaagaacaaaaataaaattaattccactactcagaaataaccacttttgcagtttctgtgtggtgtgtgtgtgtgtgtgtgtgtgtgtgtgtgtgtgtgtgkatttagcgcaaaagtggtccataattaatttatagtattacagggtcttttttcccttgataatatataatatccccttaataatatatcctgaacattttcttcattaggaaatattttttgtaaacatagttttaattggtgaatgggatttctttacatgagttcagtgctatttatttgttctatcctcttttattgtgtattaacattatttttgtttttcacaatttaagaaaaacagtatgtttgataaatgttttttctgtgcaactttttataatctgtgactgtccatagaacaaatttctaagaaatttctagattaaaagatgtgcatattttaatacatattacacatttttctccagaagttaatgttgatttatacattcactaggtatctctttccatcaccaataattagtaccctcaaattaggacacttaaaatgaatttatttagagatggtaattacaagatggtactttggggggaaatgaaagcagtaatggagtaaattatggatattagctacagacctgttaccacccctagttaagggaataagtggttaccagaagatagataagagaggcaagtagagagcactgtcttcagaagcacagtgacctttggtcaagggacacagccaagccaatatactaggggaatgaatactgtgacctcactcttcctattgtctgtacccattttaaagcagaggattgaaagtccctcttgacgcagtctaaacaggttgccacatagggcagaaagcaaggtggagaccagtggagagtgaatctggagggacaaacagaagataaccagaatacttacctactttttgtatttctatgactgtaaatacttctttatatttctgtgattattaatgacgtaaaacatttttattacctatttgtgtttcttcttttgtcaagtatatgtttatatctccccttttttttgacaaagcaggatttttatttgttacaagaaggacatcttaaatttgtattcttcacatacattactcttctttaagaattcatctttgctatacacgtaaatgtttcaagtcatcaatactttttcttgttcttttgtaatttcatttctttatacttaagaagtgcttcatctagctgtaagccattatcctcagcaaactaacgcaggaacagaaaaccaaacaccgcatgttcacttataagtgggagctgaacaatgagaacacatgggcacagggaggggaacaacacacactggggcctgtccagggggcggagagagggagagcatcaggataaatagctaatgcatatggggcttaatacctaggtgatgggtcaataggtgcagcaaaccaccatggccctctttcctatgtaacaaacctgcacgtcctgcacatgtatcctggaaattgaaataaaataagtgcttagtctatataaatcatttttctgtattatgtaagatagaaacacagttttactttcttccagttaacaagttatcccagtactatattctaaataataaagaacaaaataaaagaatagaatgatgccatttcaaatcatcacccagtgatttgacatgacatccttttcttttccaaatatttatatgtatttgagtctgcttctgtgcattccattatatccaattaatcttttggtctttcctgatgcaatatcatacgatgttaactttgtacatttttaatatatgacagtgtgttttatttattattttccaatattttcttggcatttttgtctagtttgtcaaataaacttcaaaatttaagtttcaaaatagaaaatatgatttattttaggattttgattatacttatatacattaccctaaggaaaaataaagtttttataatattgaatctttctagaaagcatctaatatcccctctcctyattttttcaaatgtcttgcctgaaactatttcattttctttaaatataaggttaattctaggtagtttattttggatgaatattgtgatatcatgaatgtaagcttttgtctattatattttctgcctactgctgctgtatagaaaagctaatcattttgttgtgtgtmtgttgtaactaaaccctaatgaaattctttgcagttttattggattttcctcggattattctgggttttctaggactatatgcatcttgatttcagtaactctgcttctagtgattcattgataagtagaatgtcaaatgtttaagataaagaatagctgtctcaaaaaacatgtttcattctaattaagtgttcttctggtatgctctacaatggggttttctttttctaaaattgggagtcgatgtgaatttgtatcacatctggccttatgtaacttatagtgttgattacatatttgtatcctttgaccaattaagttgatgagctatatttaaaattttcctaatattgaatcatctttcattcctgaaatatgtcctaagtcatttttatggaagtattaaaaactgctattgcattcagcctctagagtttttagagttttaaaatctgtttttctaaggaatactgggtgggggtggtgtgtgcacgcatgtgtgtgtacgcgtgtgtgtgtgtgtagtgctatccttgtcagatttaaatattagcttaaggcagcttcataaataaaatggcctggggcactttttcaattttttttgcctttgagcagttattatatcatgagaattccctatactttgaaaataagatagaattgtttggaaaaaaattgtgcttggcatctttcttcagcgtaatcatttgaaaactttaaaattttagctatatttaaaaaggcctattgaggttttctatgactttctgacttttgaacacatacacacacacacacaaacatgcacacacacacatgaacacaccccagttgattcaggtgtacttaggcctatgaacatgtaggttttctgaggttttctactatttggggaatatttggatcaatattttttaatgtattatagaattgtacagagtattgtattttttaaatatttctgtatgcttatatatgttctcataatatgattaaaaatgagaaagaaaaagaatataaaaacacagtttttctgatttgtaatttctctccctctcagacacatgcacgcactcagtccatttacagatttttgaactttgtttaccccaaaatgtcaacactaatatttgtctgtttttctcttcgttgatatatttattaaattattttgcctattttcctaaagatggtttaggattttttgtttatttttggtctcctttatattcacctaacttcttttttttttttttttttttttgagacggagtcttgctctgtcaccaggctggagtgcagtggcacgatctcagctcactgcaatatccgcctcctgggttcaagcgattctcctgcctcagcctcccgagtagctgggattacaggcacatgccaccacacccagctaatttttgtatttttggtagagatggggtttcaccacgttggccagaatagtctcgatctcctcaccttgtgatctgcccgcctcggcctcccaaagagctggggaatacaggcatgagccaccacacccagccaacttctttcagttaattagagcacagttttgaaagctttaaatggtagcaactgtcatctccagtttttcagttgaggaaacaaaagatgactttgttgacaaattattgaggcagacatacattttagtgttctttattaaccatcatggtgctcagatgccagagagcatgtgatgactttgccatccctgaagagtttgtctgataatccagacataagaattgattctgctctgcagaatcatttaatcatatttttattcactcattcattcattcatcaaatatccattgagtttttttgttgcagaccttgtgctagcttttcgagatacaaatatgaaaacacgtggaacctccattcaaggagactgtaagtcaagtggagaaatagacaatatctcacaaatagtaattactataatagaggtacttgcacagttttcgttacatatacatacctcatagcacaatgttactcatgaacagtagatgatttggaaatactattttattcctttataatcaatatatatatatcttaatactttctgtgtgtcagataatacactgggtcctgaggaaaataaggtataaaaataattttttcatgcttgagaagcttttagtctagtgggaaatgactcatctcattataataaagatgtataccagatacctgtgaagacatagaagagaaactttgtcagtcaggagttaaaaagaaaggccttcttcacagagaaagtagtgtttgaactgagatttgaaaggcaagcagggatttattaaatgcacaggttgtggctttctaagcgaaggaacaacatgtgcaaaggcacagtggcgtgaaaaggcaagtagtgtgctaatgctaaagcataagggacaagatggtgaggggtgagaaaagaggtataagataaaaatttatagagcacatatcttgccagacgccattctaaatactttatatagatttactccataagtctttatcgttgctttgtgttggaaatatttcaaatctagctcttttgaaatacacaataaattattgttaactatagtcactcttctgtgctattgagtactagaacttattccttctatctaactgtatttccatattcattaaccagcctctcttcatccccatctcccacaacaccaccacctccaccccaccactctccccctatgtcccaaacccaccctgtccacctttcccagcaactactgttctactctctacttccatgagatcaacttatttagtttccacatacgagtcagaacatgcaatatttgcctttctgtgcctggcttatttcacttaacatgatgacctccaattccatccattttgctgaaaatgataggatttcattcttttattttattcatttatttatttatttttgagatggagtttcgatctgttatccaggctggagtgcagtggcacaataaaataatgggattacaagcatgggccacctcactcggcaggatttcattcttttttaatggctgaatagtaattcattgtgtatattaataaatatatattttctttattcatccattgatagacatttaggttagttctgtatcttggctattgtgaatagcgctgtaatgaacatgggagtgcatatttcttcgatatcctcatttcctttcttttgggtatatacccagcagtgggattgctggatcatatggtgcaactgcttttagttttttgaggaacctccatgctgttttccatagtggctatactaatttacattcccaccaacagtgtactagcattctcctttctccacatccttactaacgtccatgctttttgcctttttgataacggcaattttaacccaggtgagatgatatcacattgtgtttttttttttttttttatactttaagttttagggtacatgtgcacattgtgcaggttagttacatatgtatacatgtgccatgctggtgcgctgcacccactaactcgtcatctagcattaggtatatctcccaatgctatcccttccccctccccccagcccacaacagtccccagagtgtgatattccccttcctatgtccatgtgatttcattgttcagttcccacctatgagtgagaatatgcggtgtttggttttttgttcttgcgatagtttactgaaaatgatgatttccaatttcatccatgtccctacaaaggacatgaactcatcattttttatggctgcatagtattccatggtgtatatgtgccacattttcttaatccagtctatcattgttggacatttgggttggctccaagtctttgctattgtgaataatgccgcaataaacatacgtgtgcatgtgtctttatagcagcatgatttataatcctttgggtatatacccagtaatgggatggctgggtcaaatggtatttctagttctagatccctgaggaatcgccacactgacttccacaatggttgaactagtttacagttccaccaacagtgtaaaaatgtccctatttctccacatcctctccagcacctgttgtttcctgactttttaatgattgccattctaactggtgtgagatggtatctcattgtggttttgatttgcatttctctgatggccagtgataatgagcaatttttcatgtgttttttggctgcataaatgtcttcttttgagaagtgtctgttcatgtccttcgcccacttgttgatggggttgtttgttttttcttgtaaatttgtttgagttcattgtagattctggatattagccctttgtcagatgagtaggttgcgaaaattttctcccattttgtaggttgcctgttcactctgatggtagtttcttttgctgtgcagaagctctttagtttaattagatcccgtttgtcaattttgtcttttgttgccattgcttttggtgttttggacatgaagtccttgcccatgcctatgtcctgaatggtaatgcctaggttttcttctagggtttttatggttttaggtctaacgtttaagtctttaatccatcttgaattgatttttgtataaggtgtaaggaagggatccagtttcagctttctacatatggctagccagttttcccagcaccatttattaaatagggaatcctttccccattgcttgtttttctcaggtttgtcaaagatcaggtagttgtagatatgcgacgttatttctgagggctctgttctgttccattgatctatatctctsttttggttactgtagccttgtagtatagtttgaagtcaggtagtgtgatgcctccagctttgttcttttggcttaggattgccttggcgatgtgggctcttttttggttccatatgaacttgaaagtagttttttccaattctgtgaagaaagtcattggtagctttatggggatggcattgaatctgtaaattaccttgggcagtatggccattttcatgatattgattcttcctacccatgagcatgaaatgttcttccatttgtttgtatcctcttttatttccttgagcagtgatttgtagttctccttgaagaggtccttcacatgccttgtaagttggattcctagatgttttattctctttgaagcaattgtgaatgggagttcactcatgatttggctctctgtttgttgttggtgtataagaatgcttgtgatttttctacattgattttgtatcctgagactttgctgaagttgcttatcagctgaaggagattttgggctgagacaatggggttttctagatatacactcatgtcatctgcaaacagggacaatgtgacttcctcttttcctaattgaataccctttatttctttctcctgcctaattgccctggccagaacttccaacactatgttgaataggagtggtgagagaaggcatccctgtcttgtgccagttttcaaaggaaatgcttccagtttttgcccattcagtatgatattggctgtgggtttgtcatagatagctcttattattttgaaatacgtcccatcaatacctcatttattgagagtttttagcatgaagggttgttgaattttgtcaaaggctttttctgcakctattgagataatcatgtggtttttgtctttggctctgtttatatgctggattacatttattgatttgtgtatattgaaccagccttgcatcccagggatgaagcccacttgatgatagtggataagctttttgatgtgctgctggattcgttttgccagtattttattgaggatttttgcatcaatgttcatcagggatgttggtctaaaattcgctttttttgctgtgtctctgccaggctttggtatcaggatgatgctggcctcataaaatgagttagggaggattccctctttttctattgattggaatagtttcagaaggaatggtaccagttcctccttgtacctctggtagaattcaactgtgaatccatctggtcctggactcttcttggttggtaaactattgattattgccacaatttcagctcctgttattggtctattcagagattcaacttcttcctggtttagtcttgggagagtgtatgtgtcgaggaatttatccatttcttttagattttctagtttatttgcgtagaggtgtttgtagtattctctgatggtagtttgtatttctgtgggatcggtggtgatatcccctttatcattttttattgtgtctatttgattcttctctctttttttctttattagtcttgctagcggtctatcaattttgttgatcctttcaaaaaaccagctcctggattcagtaattttttgaagggttttttctgtctctatttccttcagttctgctctgattttagttatttcttgccttctgctagcttttgaatgtgtttgctcttgcttttctagttcttttaattgtgatgttagggtgtgaattttagatctttcctgctttctcttgtgggcatttagtgctataaatttccctctacacactgctttgaatgtgtcccagagattctggtatgttgtgtctttgttctcgttggtttcaaagaacatctttatttctgccttcatttcgtcatgtatccagtagtcattcaggagcaggttgttcagtttccatgtagttgagtggttttgagtaagattcttaatcctgagttctagtttgattgcactgtggtctgagagatagtttgttataatctctattcttttacatttgctgaggagagctttacttccaagtatgtggtcaattttggaataggtgtggtgtggtgctgaaaaaaatgtatattctgttgatttagggtggagagttctgtagatgtctattaggtctgcttggtgcagagctgagttcaattcctgggtatccttgttgactttctgtctcgttgatctgtctaatgttgacagtggggtgttaaagtctcccattattaatgtgtgggagtctaagtctctttgtaggtcactcaggacttgctttatgaatctgggtgctcctgtattgggtgcatatatatttaggatagttagctcttcttgttgaattgatccctttaccattatgtaatggccttctttgtctcttttgatctttgtttgtttaaagtctgttttatcagagactaggattgcaacccctgcctttttttgttttccatttgcttggtagatcttcctccatccttttattttgagcctatgtgtgtctctgcacgtgagatgggtttcctgaatacagcacactgatgggttattctagttatacattcttctaactttttttcaaagttttcaacttctttgcctttggtttgaatgtcctcccgtagctcagagtaatttgatcgtctgaagccttcttctctcagcttgtcaaagtcattctccatccagctttgttccgttgctggtgaggaactgcgttcctttggaggaggagaggagctctgcgttttagagtttccagtttttctgttctgttttttccccatctttgtggttttatctgcttttggtctttgatgatggtgatgtacagatgggtttttggtgtggatgtcctttctgtttgttagttttccttctaacagacaggaccctcagctacaggtctgttagaataccctgccgtgtgaggtgtcagtgtgcccctgctggggggtgcctcccagttaggctgctcgggggtcaggggtcagggacccacctgaggaggcagtctgctggttctcagatctccagctgcgtgctgagagaaccactgctctcttcaaagctgtcagacagggacatttaagtctgcagaggttactactgtctttttgtttgtctgtaccctgcccccagaggtggagcctacagaggcaggcaggcctccttgagctgtggtgggctccacccagttcaagcttcccagctgctttgtttacctaagcaagcctgggcaatggtgggcgcccctcccccagcctcgctgccgccttgcagtttgatctcagactgctgtgctagcaatcagcgagactctgtgggcgtaagaccctccgagccaggtgcgggatataatctcgtggtgcgccgttttttaagggggtccgaaaagcgcaatattcgggtgggagtgacccgattttccaggtgcatcagtcacccctttctttgactcggaaagggaactccctgaccccttgcgcttccccagtgaggcaatgccttgccctgcttcggctcgcgcacggtgcgcgcacccatttacctgcgcccactgtctggcactctctagtgagatgaacccggtacctcagatggaaatgcagaaatcacccatcttctgcgtcgctcaggctgggagctgtagacccgagctgttcctattcggccatcttggctcctctcacattgtggttttgatttgcatttctctctttattagtggtgttgaccatttttttttccatgtaccttttggccatttgtatgttttctcttgagaaatgtttattcagatcatttgcccgttagtaaattagattattttattattgctattgagttccttatatattctggttattaatcccttgtctgatggagagtttgcacatattttctcccattctgcaagttgtctctttactgagtttattgttttctttgctgtgaagaagctttttagaatgttgtaattctatgtctagttttgcttctgttgcctgtgcttttgaggtcttatccaaacaatcatttcccagaccagtgtcctgaagcatttccacaatgttttctcctagtagctttatagtttcaggtcttatattcaagtctttaattcatctttatctgatttttgcatatagtaagagataggggtctagtttcatttttctgcatatagatattcagtttttctagcaccatttattgaaaagactgtcctttcccctactgaaagttcttggtggctttgtcaagaatcagttggctgtaaatacattgatttatttctgggtggacatctaagtttaacatgcagtgtatgtaaaggcttttgggcagaaatgataaattgatggacatttccagtgttgttttataattatcctaaatcttgtccattacctgtaaacaaagtctcatgaatttgaaacccccattcacataaggaaaatgtgatatagacacacaatatctataatactaaataagacaaaagttgtacagttttacttttatgcctctaagtggaaattttaaatgactagtaaatttgcttataaaagtatgaaaaactaaattctctgtttttaatattgtaattattttcttcataaagcaaagtagtataattttttctaaatttaatttactaatctcctaaaattcatttgcagaagaacttgtatacattaaagttctttacacatacacattcacagaagtttagaacatttaaatttgtcagcaattcctctccttctcttcttaccatttcatatagcaatactctttcctttgaaaaactcctcccatatgatacatttgattggaactaatgcttaggtcaaatctttatttaaaccactcagttcttcataaagaatactttggacaaatcctyttcttagtcagggcactcttttcactcaggtgaaacttcagtttgaaatgccgcattcatcacaaaatgactaaaagtggaactgggctaatcaaaaagttctttattttatcttcataaatgtatgacttcatgtgaaggctggaaaaaatacctgtagagattgcaatctaatgaaaaaggagatggaagcattgattgtatggcttgctgatttcaaaaccctttaatctttctgaagcacttttaatttcaggatgtttaagtagctttaattcttaatattaaaaaattaagattcttaatgcctattttttattaaaagctataaacccataaagcttagcaatttccatttctatttaaaagttaatgaagtaagagaacaagtgctttaccactgaaaaattcagagtacaactggggaaacccaaggggtgagagctgacatgaaactccaattgaaaaccatttttttaaataaatctatctggtaaatgatttatatggtttattttttgttacctacaaattctaaattggatattctaagtgtagaattccacaatgtaactgagaaaaaagagaaaatgagtaaacgagataattattagactctattttgataacttatgaaacataaattaaaaattttttgaatcctcatatgttaatcacttgattttttaaagtgtttgtgtgtttttttgttttttttttttttgagacggagtctcactctatcacccaggctggagtgcagtggcactatgttggctcactgcaagctccgcctcccgggttcacgccattctcctgtctcagcctcccaagtagctgggactacaggcgcccactgccacgcccggctaattttttgtatttttagtagagacagggtttcaccggtttagccaggatggtctccatttcctgacctcgtaatccacccacttcagcctcccaaagtgctgggattacaggtgtgagccaccgcgcccagcctaaagtgtttaaattctcaagtcatgtcacataagatttcaagagatcactagtgctcaataaatttatgttgaatttagttgtgttgtattgcattgcctattatggggaaaggctcatccttcttctactaagaaacatagagaataattgtaaatagcccttagtctgaatcatttttatgcaatatcatagacacaaaccaatggatgggtttgatagcctggagtcttaagttacctccttcacagttaagacacattgttagtttggtttactatttaagaaagcattagggtgctctttattcatctctgagaatcaagtttccactcaaccatttatatataacataaattatattataaaagtccaacacatatattagaaccagtttatttaattactatgtatgcctaattacagtgcaatttctcatattacctgagttaaaattaatgcaattcaaaacaacagtagtttatatttaaagaaaagtgaaatgtacttaaaggagctgttttttttaaagcactctcataaggaaatctttgcctcatctctttctacatgtttgacccaggagcttgcagtcaatcaaaacaataatgctttcctataagtgtaaataacaaagaagtaaacctcaatagtaaggtatcagttacaccagcggtccccagccgttttggcaccagggactggtttcctagaagacagtgtttccatggactgggtttgagatgggggggggatgatttcaggatgaatcaagcacgttacatttattgtgcactttatttatattattattacattgtaatataaaatgaaataattatacaacttaccataagctagaatcagtgagagccctgaggttgttttcctgcaactagatgatcctatctagaggtgatgggagacaatgacagatcatcaggcattagattctcataaagagcttgcaacctagatccctcacatacatagttcacaacagggtttgtactcctatgagaatctaattccaccactgatctgacaggaggcggagctcggactataayggagcaatggggaacaactgtaaatacagctgaagctttgctgacttgcttaccattcacttcctgctgtgtggcccagttcctaacaagccatggaccagtaccagtccatggcctgggggttggagaccactgaattacacaatagactgtgaaaattagatagtttcctcttctcttatatgctgtattgtttggtatcaagatattctattactggggataatttgtttttctataatattctcaatatttttttttgtacattttttttttcagtcaagagaatccatcccattaaatgacctgaagtcagaagtatcaccacggatttcagcagaggacctgattgacttgtgtgagctcacagtgacaggccacttcaaaacacccagcaagaaaacaaagtccagtaaaccaaagctcctggtggttgacatccggaatagtgaagagtatcctttgcatatgctgttttaaagggtggtactgcttatttgtattgcatcctttcatttaagtgttgtgtggttaaaaaaaaaaaattctgggattcttctgaattcaagtagttaaattactctcaaactggatgccagaatggtcttgcataaggttttataagataacattacataccagagacctgatgatattttccaaacaatgccagaatattgggatattttgttgttttttgtgtttctctggtgtatattgctattcttgaaggcatttgaatccttcatgctgtagataggaattgtggcaaagataaagagtaagtatacacctgttttacctcatagcctagagaaaaagtttgctacatctcaacactgaccttgtgttcattataattttcaaaacactggcttacatagaacatgtattttcactaactacaaaatgttatttacgaagattttactattgaacatactgtaacatccagtgggtttgattggcattagagtatgaagagttacaaaatagtaacagttcagtctcttctccttctattttcattatcttcagattctttgattgtgtattttctagaatctagataaatggttttcactttgtttaaaaacagagcaacttttaaaatctttcttagaaactcaatatataaaatataaatgaatgttataactaatttgcttcataagttcagatttataacatttactaactataaatgctataaatgagggttagcaggttaatggtttcttatatgctaaaattggcatatacaggttgagtatcctgtgtccaaaatgtttgtgacagtatttcaggtttcatattttgtaggattttggaatatttccattatatgtatatacttaccagttcagaatatctaatccaaaaggctctaatgagtatttcctttgatcctgatgttgttgctcaaaaagtttgattttggagcatttcagattttagatttttggattaaggatactcaatcagcaataagttttcatgttaatattttcaattccaatttttgaaatgaaattcaaattacacatttacagactttattaagtaattcatagaatcttaggtttctgacagtacaattggagagctcacaatttcaaatgatatattcttatcattttgtgaaaagttgctactttctatttttctgagtttggagagagtataaatgttgatatccctggttgttagggtttcagcaatactagaaactctttgcagagtggatgagtggactcccgaatgaggcattaaattctatttaactggtcaagaacccctagtctggaagttcttctgatcttatacttcaggagtttagaatctgtttaatgtttttaactttttaatttgtatttcttttgcttgagtctttattcatagcaattctcccataaaaccataaaaaataacattataacaccctattttaatcttaaagatatttcttccattctgtaggttgtctgttgccaggtccaatctgcagaccctggccgaacaacggatgtaagaatgcagtcagacgcaggtatccagtgaaaaagcgggctagaggacctggctgcttatagaccccgagcagggtgctgtaaagagtcagcagctgtagccctgacaagctggtgctgcaggcatttatttagttacagatttaatgacaaaggctttgagtcaacacacttttgcgtaattaacatagtcaccctgcccggagatagcagtcatgcatggggatgattaaaggccaggttccaagttaaactaacttacctagatcaattcctttatatctctttgctatctaacctttgctctcaaggtccagataagagggtttggctaccttcagccaaatccatttccgaagctgttgtaaaacctccccgccttccaagaaggtttgcatctttctacaatttttcccaccaccctgactgatctcctacatctcccccttttctgtttttagcatcaggttttgttgattgaagagtacagatgtgtgcagcagcaggtttgtcaggtgtggcgggcactgctcgcattccggctttgcatcctagaattagtaaataatagaagacaaatatgagtataattagccacattcttttccaattaaggagtgacatgtagtgttacttggcatcttagtccaatgtgtgccgttattgaggaaccccacttggggcatgtcattccctcttagccaagcagtcgtgttgttagaagctgagaagggggtgtttgtttaaataatagggctgaagaaaggcgtatctaagagatgggcccaatagagagtagcaggtgagggttgcaggtaaagtgaaagaattaaaaaggttaataaagcataggaaggaacaaattatctggagtgaatggtgtctgtgtccagagcagattcgctcagtcttctgacttctcttcttcagcgtcctgtccagggcctatgtcgtccgaggaagccacattttctggggctgtaggtcctatagggtcattttctttatttctggtaccaggttgggtcctagccatgctatggtaaggtttgatggatcgtgctggaatccaaagaggacctgagggggtgtgaacacaagcatatcctctcccacatgttaacaattcatttggaccacaccgtacattactgtttacatctttccataaaactgcaggttttatgtcttgagaggttttagcaaagtgcttttctacagctaattgaaatttatcatctaaattttcaaaattaagggtaaataaggcttgtgctagtagtgttgcagggtccttactcatattcccccttttttgttttctgagcatatttttaaggatagagtgagtatgttctactatggcctctccttggaggttataagggatgcctgtggaatgttggatattccactgtgacaaaattgttgaaattgtgagctggcataagccagaccattattagttttaatttttgtaggccaccccataaatgcaaaagttaaaagacgatgtttaatgacatatcgggtggactctccaggaaaggcatgagcgctaattgagaattgttattaatggatacatgtacatatcttagtttttcaaattcaggcacatgtgtaacatggtgtttgccataactgattaggttctagtcctctagggttaacacctgtataaggagggaacgtgcctgtgagctggcaatctgggcattgccggttaatttgtttagctagtctctgggtaagttgaaattgttcagataagtttctccagttttggtggaaaaattgatgtgactgggtggcttggtcaaacagtgatgttctaacttgtacgtctgcttgatcatggtcataagccagtgggccaggcagtgagctgtgggctcaaatatgtatgataaaaataggatgtgtatgttgatctagcaaatgctgaagtcggagaaaaagtgcatacagggtgggctccagagtggacttaatgagggccctctcaaggttctgcaataaataaacagagtaagcagactcactaacaatattgatgagctgaatggaaaaagtttccaaggccaatagtaaggctccaatctcagccctctgagcgctagtaaatccagaacaagtgagggaattacgtgatttccaccagaaagtgacttttccatgtttaccagagccatcagtaaacactgttaaagcattagatatgggggattgaactgttttagtaggcaaaaccacagaagtacaagataagaactgaaggagtttgtcagcaggaagggcatgctctatatggcctttgtaatcagagagtgctatttgcaggtccatagataaggcaatactgccttgaattgctttttacttaaaggaatcctgatgatatcagggtcataacctagcaactgattgcatcatctgcatcctgaataaatgactttactgactaactggatatagggaaagagtgttttagtcccggtatgtgagcaaaaaacccattctaggaagcgtagccctggggtcatctgtaggggagtgtttagtgggaaaaacaaataattgaactgaataccatgtatcaatgcaatctagttgtctctgagaaatagcttgctctatctcttcaatttccctttgtgctgcaggagttaaatacctaggagagtctagggcagcattgccttttaagatggaaaacaagttctgtaacttatcagtagttatgtccaaggtggggcaaatccagttaatattacctagtaatttctgatcatcatttaaggtatgtaagttgctagtatttaatttaaccttttgaggtcttactgactgggaaattagtatgtacccaagatatttccaaggagaaagacatctgtacttytccaggttctatgattaaacctcttaactgtgtattctttacgacagaggcatgtgacttgaaaagtactagctctgttggggctgctagtaaaatatcatctgtaaaatgagtaatcctgcaattaggaaattcttttctactggggagccaagcttgatttacatgatactgacacatggtaggactgttcagcattccttgaggaagcactttccaatgaaatcagtgagctggcctttcattattgatagctrgtattgtaaatgcaaatttttctctgtcccgttctgcaaggggaatagtataagagcagycttttaagtcaataatgattataggccagtctcgaggaattgccacgtgggaggggagcccctgctgaaggggccccataggttgcaaattagcatcaatagcacgtaagtcatgcaaaagtctccatttaccagacttttggggaatgatgaaaatgggcaaattacaaggactgtatgacggttctatatggtcagcttttaattgctcctcggctaattcatgggctctttataatttctctccctttaaaggctactgttctacccaaataggattttgagagagccacgttaggggtaggggagaaataacagtggccattgttagaaagaggtctgcagagtggcctcagttaaccctcttgtaaatgggctagtggctccgttttctttaatgcttttttttttttagctctttataagcattaaaagaaatgattgccttgttgatcttgcattaccaggcaggctaagagctccccatctaatgctgcttgcgtaagacagcatatcccttgtcttttttccaattttttggatgaggggcctcaggcaaaacctccatttcctctttgttattttttcctggagacagcggggctgagggagatggaggcagtaaggtaggtgacagttcttcctcccttccctttttaggctcttctgtgtagagtaggaccagagccaccctaactaaagcccataacgttaaagatgttattgggacccattgcccttgtacatcatgttgtttaagatttctacccacttgttcccagatctccaagtttagtgcaccttctttcagaaaccatgggttatgggaaacagtagtttgcattaggtctcttaattgagcctgcgaaacsaaggctctgctacctttaagcagctgtttcaatgcttttatatactgttgctgttgagctgataactgttgtcctatgatgaaaccctagcctgaacagttctctccaacttggaaatcctgagtgggcaccaatgacttactgacttactgactgcgcagtcttttcaccttcatttttgagggttctatcgcagtccattgcagcattcctcatgtggagcaccacctgctgggtctgacccatagaccctggctgaatgatggatgaaagaatgtacttagacacaagtattgagtgaaagagtaggctaagggaccagaccgctgacagaaagagttgtagcagccgcagccctgacaagctggtgctgctggcatttatttagtacagatttaatgacaaaggctttgagtcaacacacttgtgggtaattaacatggtcaccctccctggagagagcagtcctgcacgtggatgattaaaggccaggttccaaggcctaaataaactaacttatctagatcaattcctttatatccccttgttatgtaaccttcgctctcgggctccggataagagggtttggctgccttcagccaaatgcttttccaaagcttttataaaacctcctggacgtccaagaaggtttgtgtctttctacaattttttccaccaccctgaccaatctcctacagtctgtttactctgttgatagtttcttttgctgtgcagaagctcttaagtttaattaggccccatttgtcaatttttgcttttgttgtgattgcttttggtttctttcatgaaatctaaacccattcctaggtttaggatggtattgcctaggttgtcttccagggtttttatagttttgggttttacattaaagtctttaacccaccttgagtagatttttgtatatggtgtaaggaaggggtccatcttcaatcttccgcatatgactagccagttattccatcaccatttattgaatagggagtctttttcccatttcttgttttctgtcagctttgtcagagatcagatggtcatagatgtgtggycttatttctaggctctctattctgttccattagtctatgtgcctgtttctgtactactgccatgctgttttggttactgtggccttatagtgtagtttgaagttgggtagcatgatgtctccagctttcttctttttgcttagcatcgtcttggatattcgggcccttttttggttccatatgaattttaaaatagttttttcttgttctgttaatgtcactggtagtttgataggagtagcattgaaactgtatattgctttgggcagtacagccattttcatgatattgatccttccgatccatagcatgggatgtctttccatttgtttgtgtcttctctgatttctttgagtagtgttttgtaattctcattgtaggggtccttcacctccctggtgtgctgtattcctagggagtgtgtgtgtgtgtgtgtgtgtgtgtgtgtatgtgtgtgtcagttgtgaatgggattgcctttctgattttgctttcaggttggttgtcgttggtgtataggaatgctagtgatttttgtacattgcttttgtatcctgcaacctcactgaagttgtttatcagctgaaggagcttttgggtcaagactgcatgtttttctagatatagaatcatgtcatctacagagatagtttgacttcttcccttcctattcgaatgagctttatttctttctcttgcctcattgctctgactaggactttcaatagtatgttgcatagaagtggtgagagagggcatccttgtcttgtgccagttttcaaggggaatgcttccagcttttgccccttcagtataatgttgactgtggttttgtcatagatagctcttattattttgaagtatattccttcaatagctggtttattgagagttgtcaacgtgaacagatgttgaattttatcaaaagtcttttctggatctgttgagttaattatgtagtttctgtctttagttctgcttatgtaatgaatcacatttattgattttttgcatgttgagccaatcttgcatcccggggatgaagcctacttgatcatggtgaagcagctttttgatgtgctgctggattcagtttacaagtatttcaytgaggatttttgcatcgacattcatcaaggatattggcctgaagttttccttttttaytgtgtctctgccaggctttggtatgaagatgatgctggcctcatagaatgagttaggtataagtcccttcttctcaatttttttggaatagtcwcagtaggaatggtaccagctcttccttgtacatctggtagaatttggttatgaatccatcaggtcctgggttttttttggttggtaggctatttattactgattgaacttcagagatcattattggtctgttcagggaatcagtttctttctggctcagtcttyggagggtgtatatgtccaggaatttttccatctcttctaggttttctatttgtgtacatagagcatatggttattttcatttctgtggggtcagtggttacatttcattagtcatttctaattgtgtttatttggatcttctttcttcttagtctagctagtggcctatcttgttaattttttcaaaaaaycaactcctgaatttattgctcttttgaatagtttttcatgccttgatttccttcacttcaccctgatttttgtaattatttctcagttctattagctttgaggttgttttgttctcacttctctaattctttccattgtgaagttaggttgttaatttaacatctttctaactttttgatgtggacatttggtgatattgtattkccctcttaacactgccttagctgtgtcccagagattctggtatgttgtatctttgttctctttactttaaaagaacttcttgatttctgccttttattttttacccaaaagtcaatcrggagcatgttgtttaatttctatgtaattgtatgattttgagtgatttttattgtgttgacttctatttttattttgctgtggtctgagagagtgtttggaatgacttcagttcttatacatttattgaggattgttttatgtccagttatgtggtcgattttagagtatgtgccatgtggtaatgagaagaatgtatattctgttggtttggggtggagacgtctgtaaaggtgtgtcagattcatttggtccaatgctgagtttaggtcctgaatatctttgttaattttctgcttcagtgatctgtataatactgtcattggagtgttgaagtctcccactattattgtgtgggagtcgatgtctctttgtaggtctctaagaacttgctttatgaatctgggtgctcctgtattgggttcatatatatttagaatagttaggtcttattaaattgaaccctttaccattatataatgcccttgtctttttttttwaatcgttgttggtttgaaatctgttttatctgaaattaggattgcaatccctgcttttttctgttttttatttttttggtagatttttctccatccctttattttgagcttataagtgtgtcattatgtgtgagatagtctcttgaagagagcatattattgggtcttacttttttatcctgyttgccactctaccttttaagtggggtattttcaccctttacattcaaggttcatattgatatgtgtggattgggttttgtcattgtgctgttagctggtggttatgttggcttgtttgtgtggttgctttacagtgacgtcggtctgtgtgtttaagtgtgcttttgtattcactggtagtgatctttctatattcagtgctgctttcaagatctcttgtaaggcaggtctggtagtaatgaagtcccttaacatttgcttatctgaaaaggatcttatttcttcttcacttagagagtttagtttagctagatatgaaattcttggttaaagattttttttctttcagaacattcaatataggcccctaatctcttctggcttttagggtttcagctgagaggtctgctgttagcctgatgggaatccctttgtaggtgacctgcccgagttctctctagatgcctttaaccttctttctctcatttcgaccttggaaaatttgacaattatgtgtctcatgtatgatcttgcgtagaatcttgcaggagttctctgtatttcctgaatttgactcttggcctctttagcaaggttagggaagttttcatggaagatatcctgaaatacattttccaagttgtttgctttcttcccctctctttcagggatgccaatgattcatatattcagtctctttacataatcccataattttcagaggctttgttcattcctttttattctttttttttttattttagtctgactgccttacttcaaagaaccagtcttcgaattgtgagattctttcatcggcttggtttattctgctgttaatactggagattgtattgtgaaattcctgtgtttttcatttcgattatctttgttcctgtccatattctgaattctgtttctgtcattccagccagttcggcatgattaagaactcttgttggaggactgatgcagtcatttggaggacacatgatactctggccactttagttactggagttcttgcattggttctttctcatctctgcatgtgggtgttcctttaactgtggtgtagattgagtacagtcaatagacttattttctggatattttcactgggatgagtatttgtatagagtctttattggaagctgactgactgtctctggctttagagtgggttacgttagtgaggtattttttgtgttgaagctttggggtttatccagcaggtgacacttagccttatttgtcagttggtagacttttgttcagtagtgtggctcccttatgtttcctcatagttgcagccatgttccctctcagtgctctgaaagtgtgggctcctctcccccttgagtgcctgctatagttcatgacttggcactcctgggctgcccactgcagctctgggatgatctcagagtttatattccttccccagcttagaggcagtagaggaagagatcttagtagtggttgtggccaagggtcatttttttttgactcctgggggctccgccccagagagatgcaggtcatcaatcactcagcgaagtcagcccaaaatggaggtttgttctgtgggcccaagccaggagtttcctgtctggtgatgagttttggggagtgtgtgggacctgtgggagatggactggcctcctctccttggttcaactgcagcttgttggaggtatggataagacagttaaggtctttgcttcttcattagttcaagggtggctagggcagttccactgcagagacagtggcagagaggcttttatttgcccctgtaggctctgggcagggagttgctgagttcgcactggctcgatagctctggttggggtggctggaaccccaggcctggaggatctgcccagtaaggagatgtgggaacaggaacccatgtaatagtctgcccacttttctgtagggctgctgcagtatgcttggggcccactctaggccctagtcatctcggattttccagaacctggaggtgtcaccagtgaaagctgtgaaacagcaaagatggcggcctgttcctccctctgggagctttgtcccagggaggtatggacctgttggtggtttaaaggcacctataccaagtgtctggagaccctggttgggaggtcctgcccagtgaggaggaacaggatcagaacccgcttaaaaaagcagtttgtattctggccacattttggtagagcatctatgctgtgctgtgggattccttctgccttgagtcagctcagactgtggtttaaaggcacttgtacaaagtggctggagaccctggttgggaggtcctgcccagtgaggaggaacaggatcagaacctgcttaaaaaagcagtttgcattctggccacattttggtagagcatctatgctgtgctgtgggattccttctgctctgagtcagctcagactgtccaaagcctgaaggctggaatggctaaggtgtctgaacagcaaagatggcaacccacccatctccctgggaactccttcttagggaggtgcagtgccactgctggtagctggctggatcccaagccagtaggtcttatcttgtgaggtgccatggaagtggggcctatgggttgttgctactcagccttctggattcggcctctttcctacgggtatgtacaggagtctaaccttctactttgccaaagctgcagctacttttgccagaaagcccaataataatctaaggcttcagggtctccacctatgcctgagcagttgctctgccaagacttcatgtagctctgtccgtcacactgaagactgaaggccctggtggagtgggttcacaaggagatctcctgacctgagggttgcaaagacctgtgagagaagtgtgtttttctggggccgttcattcactcaccacttcccttgggtgggggagtatcccctggttccatgttattcccaggtgggtcgttgtcctgtcttacttttcttcattctctaaaggtcaagttgtttccttgattagtcccactgcaaatacctggatgtttcagctgaaggtgtggtatttacttgcccccttctgtttttctccatgagagccacacacactagctgcttctagccacgcacactagctgcttcttgaatagattgaagtaaattgacttctaataatagcagtctttaagttcttacactgtaccaagcatggtgctagtcctatgytgtatatactgttgttatctctgttttactgataaactgaagtttaaagaggttaagcaactttcccaaggccatataactagtaattgcagagccagtcttgtgcttctaaattttacactattttacaggtgcctatctggtctctgcatagggacagttaagcataaacaagattgaaacaaatgagttaatagaaattaatgagtcagtgagacatgcattgattcctctacactagatatattcattcagatgttatacacatttcttcaaatcttacacacaaaataagctattaccttcagcacctgtgtgtataagaggactaatcccagataccaactgaacaaatctacctgtggttatctttatacagatgtagccacagaatcgaggaaaactgaagtatttcaaattttagaaagcagtattgcaacactttgagggaggaaacatgatagaaagatccttccctattatattgacttaatttataatatttaattcattcaaaatctttttaataaaaatttccctaaagctactaatatgctgatgttttttaaacccctttgaaattttaataatatttttaaagtaattatctttgtacagtaactcttaatgcttaccaaggtaaatcttcgcaattaaagtctaggatttatgtgactttaacaatctgtttaagaagtgattacatatttaatactaggatatttttgaaatagttttatttctctcttgccgcaaaatgtgaccctktacaatatggaaaaaaaagaaactttctctaacaccttttccttccctagaggaagcaaattatttttgaaatgttgttcaaattatttataatgtccctgtatcatgtttatcttctgttttgcttttatacatcatttaaatgggaagtctttgcctaacacagttcttacatcttcattataggtgaagttttttttcctaaattgtgcttccaggagatttaatgtctaaaaatatatttcatctcgtctttttttttaacctatgtaaaatgatttaagtggttgcttatgacagggagggaggcaatcttatccacaggcaaaataagctgtctaccaataaatttaagggacagcctcactactaccaccaagcccccttcagaaccttcacttgatgcctgaaacgctactgttgaggcttcagtcatttagcttgtgttatgaatagtctcagttaaaatacaaaaagcctgcaggtggtaatattttaatctatgttcagtttttgtgattgtaggagasaagcagcacattaaggtgccagcaatcttagggaactacccaaaccccaatgtgggccaagggaatggagaatacagaagaagaaagctgaaggacatgaagacaaactttacccacttaacaataaaaacataatcccaaaactttagaataagaagaaaccctaatatagtctaaactcttaatattaaagccaaaggctcagagaggcaaaacaacagtttttgttgaaatcacgtttttttgtttgcttttagaagatagaaacatgaaatgttaatctaggtaaaaatcaagtcagatatatttgttcttcagtatattttgagaatttcaaagcaaacaaaaattgcattttataaggaggcaatagaaaatgttttcatgtagtgacatgaatttcagaagtgatgttaatagtttccatggtaatacacaagcaaactcttgttttctttaatagttgtaaatatttagggtttcagttttcttggaagttcatattaagagaggtcttagtcatgtaattgtggatccaatttattttatctgtaaacagcaatactttaaaggaatgttactcatttgcttgaaatcaaggctgagtttttgctcaaggctgagctttacttgtaaaactcttaccttttgatttttaaaaaaaagttagtatctaaaactataccaaagacaacctcaggcttaaatttgttttttgaaaaacacataaacccagttgtattcattatttcattatggcacattcatccttagtgaacactagtattactcttgtctctttgtccttaataattgatttataaaaacttcttcaaagcaatttaaagatactcatgagcagagcaggacagatactgatgagaaggtttagtaaggtttttttcatctcatttgggcttaggttcaatctatctaaattaaaatttccatccaattgtattcccatatttgagtgggctttgtataatgtgggagtatatgatagcaactgctgagcaatgtcttcatgtctggattgctagttatgaaaggtgtattagctgttaaagagctccgatttgctgtgagaaccatccatgaccccagttcctagagtgccatacagtctcattcaatcagccagccagtcctgtttgaggacctgctttgccaggcaatggggatatagagtttagttatagcacccctgcccaccagaagctcacagtcttataactaaaatagatacatgaaatagataattgcagtataatatgaaatggcctatgtctgaagcatacccaaatgtcatggaaatataggatgggcacctaaaccaggtgatgtctgacatgattcttaaaaaacaagtagaagttagtaacctaacaaagaaaagagagaaagcattgaaaaatcacattgtttgaggcccagagaaggtgagacagacacatttaggaagttacaagaattgtggatgagcatgtctggaatatatgagaattagtaatgaaactagagtaggtaaaagtagcctcattgaaaatgtctcataacatgctaagaaatttgggttttattccaaaggcagtaagaaacttaaaaaattctaaacaggtaggtgccatgctcagatttttatttcagaaaaattactttaatgcattgtagaggatggatgagggtagagataatcttgcaggcaaaattaggattgaattatccagaaatttgatgtgtataatcattcattcatatcctgtcataaagagtgaggtccctagcttttccctaaataaaccggttttagtgagcctatgctgaagaagattgagagaaattacttttgttgctgtttctttcccttttctcaaagtgtgtgctgacaaagggaaattctatatcgttgacacttgcaagcattgttagatactggtgccactggttggggtggccagaaggcaccttagcatatttgctgccgatactagttactccaggtttggcaaaattctgaaattcatttactcaccaaatatgtaagtgatgttctaagcattctattaatccttgcaagagattcaaagacgaaataaatataatacacattgttcctatcagttgtttagatagaagtcattttcattagaaaattttatataaaatcaaattgctgttataagatatgtacagatactgtgggaagggaaactttcatggatgaaacatttgaaggatggatgtttgaatgcgcaaaaatgagaaaaagatatttgggcagagaaaactacaggagatagaaaacatattggtaacagtgcatgatttagtttggttggaattaaagtagttaggttctattcatgaggactgaactgagaaatatgggctttgtcctataggcagtcatagaaagtttctcagaaaggatacaataatcagaacactttgcttttaaattttttctctgtcaatattgtaaatcaagtgtatttccaagagaaaagacaaaagttggagaaaacagttactacagtagtttaagctcaagacaaatcaatatctgaaataggcaaggggtaatgggaataaaaatgtgagtacaagatttattagagctgtagaatattggatgttgctactgataagatgttggaaatgagatttttgactggttgatttgggggatggtgatgccattcagactatcaatagatttagcaaagaaaatcatgatatctaaacatcatttttatatcagttaatgctatttagttatggtatatatgagagaactgtgggtttaatttcatatttctttttcgctgttgatatactaaaggtaaaactttcagtttgggctgaaaggtctataatactaattataattagttaacccagcagacaaacagccaaaaaacaaaggtaggtagatcttcttgaatggtttggtgaaatattggtgtgtgttgtctttaaagatacgatgtcactaagtgtggcatccagcaaaaatgctgtgctcttttaggatgtaaaaaaacatgagctggtttctgtgctgaattttaaacaatattttaaaggaattttcaaatctttttgtaaattgaagagtctttctgaacatacttggttaactaccatgtaatttacctatacactgtacctatattcttatacctgatttttttctgtttgattgaagtacagcatatctacttacagcattgttttgtagactgaattatgaatacaggaaagttttaatatcttagaaacctagaagataatatacatcatccctacctgttaatgctattctgataatccaacttatttatcagaagtttacagtaattttttaaatctgtctgtgcattgggctatcaaattctgtttaatgcaaatttttgattttgttcttagcacacattcaaatacttttggtagtatctgccaaatggaatattgagctgaatggcttatttgcagggaggggtacaacttactccaagacagggtaagatatatagtgtaaggtcaccatatgccaaagaaaattcatatgtttactggaatatatcctgtagtgcattcagcatagtaaacaaccatatccaaacacgtggtaaagtgactgctacaataactggatgcttttatgctttcataactattattattccagtctagagatttcattgtaattactgctgacttctgtaatgatgttttttatcttttaacgctttcaagtatgtcataaaaaattctaatttcctatgaacactggaagttaaaaattagtgtttatggataccattgccacttttgccaaaacctaaccaaaaattgtaatgtcattgttgggattacagtatcatgatatatatgtgattggggctaatcaccccataagtactttggctactatttccttaatagtaatatttcctctgaactgggttctttgaagctgtagctttttaaactcttagtttataaaatagcatagtgactgactgttgagtattacactcattatagaacctctttaagtgtggttattgtttaccccatatctgtgtttatgtaatgagaaaggcctttttaaaatgtaaaacattagtgtagaggattcagatttttatctatattatacagaaagcagtaaagtgacagtcatacttcaaaaatatgtagtgttgcgtgttcatctctaaccctacctttgtgtgaaggtcctatgtatacttgttttccactgtaatacagtgaaataaaaccaaagttcttagagcatggaaaaatgtgcttatctcaacatattctctatcatgtctctttccttgccagattttactcatgactgatgatagtcaactatggtcattcagagtcaccatatgtcaaaaattttcttctattttcctctttatttatttattctttctaataaaaaatatacagaaatctgttgtttgctcattttccaaatacctcatattttattctgattatgaagtactcaacaagtgaaaaaagtattcacctacctagatttacaatataatctgaccacctctcaaatgtctagaagttgcctaaagcagttctatttcacctaatgctgtctgtgtcacatgggaaattgtattgtaggccatgtaaatactttccaaggaaacaagaagagatttctaaataaccaaagttgtcttcattatccaacttatataaacaacaggctattcattataaatatacttatttataactaggccaatctcattctcctctgttttttgccagtaatacattctcctctgctgttttccagtaatgatagacgatttagaggtttgaccaccatgtctacagacattcatgcttacccaatcatttttgtgctataagtttcatgacaagagtgttcttggatgagtgttcttagatattatccaggacattttggttgaagtagattaagaataaggaaagtgtggtttaaaactctgtttcttttgtgccttattttccaaagtgtagcctaaaaaaggtttggaatcattttgtattttgaaaaactttctctttcaaaaaagactctgttgccgtcatattttgtgaagcattttaatatttaatctagattttttaaacaaataataaatcacaaggataataggataataactttatgacatacttttagtaactgaaaggagtttagattaaaatcttctttaaaggcacataataaataggtgatatcgagcctacaaaatcaccttaatacttatctatgattatagatatagttactaggtatggttatttagatatagatgggtacttttttaaccaaatacagtattcactgaatgtatctattaaacagttcttcttttagagtcagggtcttctaattttctaatacgtggctgaacaaattttatggatggctgaacaaattttatggaagaggcacttaaaggtgattttacatgtaaagcttaacacagtctgagcattatcttttatgtcttttatttctgattttcaagggagagaatctcattggctcagcctgcatcatatatccaccatcaccctcccctccaccatcctgtcagtcatggttgtagcagggtcatctgataccaacacgacaacctaggctcaccctttcctcagggtcagtggttggtgctcttccaaacaagaaaacagcaggtgggcaggcagcccaaacatgtctgctacagcatttcaccaggatagatttgtattgcttttgctactctaaacacactaaaaaaaggaaagatgttcatagttgaaaaggttgtttgataaatatggaaacactctctggcaactgattcaggcctcacagatgtagatataggtgctgagaatatatgagttgtttgttaggttcttagtatgtgttataaaaaattttcattttaagtagatctttactgaaaataaaagtactttcagttttttaaaaaagtaccatcagagtaattatattctgagagaaaagtcattactcttcaggaaaactgcaattgggaatattgaataattagaaatgtttgagaaactaatgctgatgaagttcaaaggtaatctacccatgatcataaattctctgcccattctagaaaacttcaactaaacaatgcctactggaatgttaatgttgattctctctcctttcatttttcagaacttatttacagttctttctctcattattaatgtcatacccttttctttaaaaaaaaagatgaagcagcagctgactagaaaatttaaattgtaagatatgtagtccatctccaccatctccactctttatagaacctctttaagtgtagttattgtttacccatatctgtgtttatgtaatgagagatgcttttgatgtaagatccttttatatctttggctagtcatcttcctttctcttttctacttcattttcaaatttaactttttttttctcctggaggtgccttacttcatttagataaaatactcacataagctggaagatgtttagtactatcttctgggagtcacttagctctgtgagtttccctcagacactcaggattgcacacaaataaatgttttccttaaactttccttctcagctttattcgtggtcacatttcaggaagcatcaacattccattcagtgctgccttcaytgcagaaggggagcttacccagggcccttacactgctatgctccagaacttcaaagggaaggtcattgtcatcgtggggcatgtggcaaaacacacagctgaggtaagtatattcagaaatgtcatatgtacatatgatgagtgatttacctgccttctatatgaaggttatctaaaagtatatttcttcaggagttggtcacaaatactatgagctttgaagatttgtctgtgttcttatatggaagagtttgtctgcctttaattgaagcatttttccttcagtgttcagcatcagaatcaacagtaaccttaaaaaatcaaaatagcctaaggctgtttttttctaactgctttctgaaattgtaaagaagtagcttgaattccctccactggagaaaaacagtagtgttcaagtgtaggctctgagagctggtcatgatgagatttgttagatttagaaattgtgtttactagagactcaaagctttttaatgatagagaattcagggagaatgtcaactgtcagacatgagaagtacatgaaacaataaaatggcttccttcttccatggctatgttctaagcaaattgaaaaataaaacaaagagtagcatatgaaggccaaaaatatctttattttttaataaaagacaagttgaagactgtagcttagtatgagagccaaatggacttacttaaaaacaagcagccagagaaggtatctagatataggcaacgttgaacgagtacaggatctttctctaaaagggaagaatctgctcctagaaaagtagcagaggtaacttgctccctgcagacagcttttttctaaaaggaagataagcaggactgagccttcccaaatttaccaatcaaataaatccttcaacctcccagggcacagagaatagagggacaaagagaaaggccaggaatatgcttaggaaaattctgtcatcagggaaatcaggagtggagacaaaatatttgccttgattgtacatattcctttgagcactcctgaaatgtggtcactgaaaatttcagattagaactttaaaactttattttttttttactcttagtaatcagagaaataacctaaaatgtcttttattataaaaactaataaccacactttgttgaacacttggaaaatatagagagaccaaaaaaggaaataaaaagtatgcatgattttaccacctgggaggcaaaaaacacttcttgaatttttttattggaaaattataattcctccattcaattcaattctgatattggctaaaggtaaccctcccatccccacctgcacataccccatactgatacaaactcagaaaaaaggaaacatgaaaatactttgctcttttattcctagagcgagtgtgtatgaagtccatgaaaacaacatgtaagggttacatttagagaactatgccatatgatttcatagtaaggaactaggctattgatttttccaaatttgatgccttcactataatttttaagtcttttaagtttttgcttttcacagagcaaaatcgagaggaatagaaatttcccatataccactaccccacacatgcacaacctttcccattatcagcctcccccatcagagtggtacatttgttacaactaatgaaccttcattgacacatcattatcatcccaagtccacagtttacatcagggctcactcttggtgttgtatattatttttaatttgtaataaatttttattaacttttattttaggttcagggatacatgtgcaggtatgttatataggtaaacatgtcataggcatttgttgtacaggttattttatcaccgaggtactaagcctagtacccaatagttattttttctgcttctcttcctcctcccaccctccagcctcaagtagggcccagtgtctgttttttccatctttgttagaaatttaaaactgtaaaagtcagattagaactttaagactattgatcataaaccattttaagcatccaacaatccatgtctcagaagtacaggactgatagcagcattaactttttgtttgtttgtttgtttgagacgagtctcgccctttcgcccaggctggagtgcagtggtgcaatctcagctcactacaagctccatctcccagattcacaccattctcctgcctcagcctcccgagtagctggcactacaggcacccaccaccacgcccagctaattttttcgtatttttagtagagacggggtttcaccatgttaracagggtggtctcaatctcctgacctagtgatctgcccgcctcggcctcccaaagtgctgggattacaggcgtgagcctccgcacctggccaggattaacttttgacactaaatgaaagtcattcttaatgatgaaacttaactaaccatactaaagaagtatgcaagtggatattacttctaagttataaatcactcacctatcttttatataactgtatctaccatccaacagagaacaatctcaatacacctatttcagagaaagtcagaaaatagtaacacacatggtttggctatttgtcccctccaaatctcatgttgaaatgtaatctccaatgttggaggctggcctggtggtgagaggtgacagcatgctggcagcccttgcagccctcgctcactcttggcacctcctcggcctcagcacccactctggctgcacttgaggagcccttcagctcgccactgcactgtgggagccccttcctgggatggccgaggctggagccagctccctcagcctgcggggaggtgtggaggaagaggcacaggcgggaaccgggactgcgcacattgcttgcaggccagttagagttccaggtgggcgtgggcttgacggccccgcactgggagcagccggccggctctgggcagtgaggggcttagcactcaggccagcagctgcggagggtgcgccaggtcccccagcagtgctggcccaccagcgctgcacttgatttctcaccgggccttagctgcctgcccgcagggcagggctcgggacctgcagcccaccatgcctgagcctccccccaacccaccgtgggctcctgcccggcccaagactccccaacgagtgctgcyccctgcttcacagcacctggtcccatcgactgcccaagggctgaggagtgtgggtgcacggtgtgggactggcaggcagctccacctgcggccccagtgtgggatccactgggtgaagccagctgggctcctgagtctagtggggacttggagaacctttatgtctagctaagggattgtaaatacaccaatcagcactctgtatctagctcaaggtttgtaaacataccagtcagcaccctgtgtctagctcagggtttgtggatgcaccaatcagcactctgtatctagctaatctggtggggacttggagaatctttatgtctagctaagggattgtgaatacaccaatcggcactctgtatctagctcaaggtttgtaaatgcaccagtcagcactctgtgtctagctcagggtttgtaaatacaccaatcagcactctgtatctagctaatctagtggggaggtggagaacttttgtgtctagctcagggattgtaaatgcactaatcagcaccctgtcaaaacagaccaatcagctctctgtaaaacagaccaattagctctctgtaaaatggaccaatcagcaggatgtggttggggccagataagagaataaaagcaggctgccccagccagcagtggcaacctgctcaggtccccttccacactgtggaagctttgttcttttgctctttgcagtaaatcttgctactgctcattctttgggtccacactgcctttatgagctgtaacactcaccacgaaggtctgcagcttcactcctgaacccatcaagaccacgaacccaccgggaggaacgaacaactccagatgtgccgccttaagagctgtaacactcactgcaaaggtctgcagcttcactcatgagccagcgagaccacgaacccaccagaaggaagaaactccaaacacatccgaatatcagaaggaacaaactctggacgcgctgcctttaagaactgtaacactcaccacaagggtccgtggctgcattcttgaagtcagtgagaccaagaacccaccagttccggacacagtgggaggtgtttggtcatgggggcagatccttcgtgaatggcttgatgtcctctccatggtaataagtgagttctcactctgttagttcacatgagagctcgttgtttaaaagtctggctcttcctcctttctcttgttcctgctcatgccatgtgacatgctggctccctgttaccttccaccatgattgtaagctttgtgaggtttcatcagagatagatgtcagcaccatgctttctgtaaaacctgcaaaactgtgagccagttaaccatctttttttaatagattgcccagtctcaggtacttctttatagcaacacaagaacaaactaacacagataattggtaccaggagtggggtgttgctgttaaatacctgaaaatgtggaaacagctttggaactgggtaataggcagaggttgaaagagtttggaaggctcagaagaagacaggaaaatgagtaaaagtttgaaacttcttagagactgattaaatagttataaccaaaatgctgatagctgtatggacaataaagtccaggctgattaagtcttaggtggaaatgagagagttattgggamctggagttaagattacccatgttacaccctggcaaagaacttgacaacagtgtgttcatgtcatagggatctgagtttaaacttaattatgatgacaagatacctggcagaaaaaaaaaatctaagcagcaaagcattcaagaagtggtatggcttcttctaacaccctaagtcatatatggaagcaaataaaagacttaaagytatatttaaaagggaagcagagcataaaaatttggaaaacttgtagcccagccctatggtagaaaaaatccaagcaggctacagagcaaccatttgctagagagattagcgtgactaaaagggagccaagtgctaatagccaagacaatgggtaaaaggccttgaaggcatttcagagttcttagggacagcccttgtcatcacaggcctagaggcctagggaagaagaatggtttcagtggtcaggcccaggaccccacttccctgcacagcctcaggacagtgctccctgcatcgtgaccactcaggctccggccacagcttaactgggccaaggtaaagctcaggctgccaccctagagggagcaagccgtaatccctggcagctttcatgtgatgttcagcctgcagatgcacagaatgcaaatgtgaaggaagcttcgcaactcccacctggattccagagcacgtgtggggaagtctggatacccaggcagaagcctactacaggagcagagcccccacagagaaactatactagggcagtgccaatgggaaacgtagagtggagcccctgcagagtccccaccagggaaccggctagtggagctttgggaagtgggatgccaccctccagacctgagactggtagagccattggaagcttgcaaccgcagtatggaaaagccataggtactcaactccaacctgtgacagcagccatgagggctgcaccttggaaagccacagggacaaacctgtccaaggccttcatagcctacatctcacaccattctgcccaggatgtaggacatgtcaaaggagattgttttggagctttaagatttaatgagtgtcctgctgagtttcagacttgtgtgggcgtattgcctctcttttggccaatttctcccttttcaaatgataatgcatacccaatatctgtagcaccattgtatattggcagtaaataacttgtttttgatctcacaggctcataggatcaatggactcatctccagatgatacgtgagacttgacacttggcacttgagacttgagttaatgctgaagcaggttaagaatttggtggactattgcagaggcttggttgtattctgatatgtgaggaggacataagacttaggggatcagaggcagaatgatgtggtttggatgtttgtcccctccaaatctcatttcaaatgagataacataatccctatgttcaatgtggagccttttaaggaggtgtttggattatgggggaagatcgctcatgaatggtttggtgccctcccagtggtaataagtgagttcttgctctgctaattcatgtgagagttgttatgagagttgatggtttaaaggagcctggctccacctcctctctctcttgttcccactctggccatgtgacatgctaactccctgttgccttctgtcaggattgtaagcttcctgaggcctcaccagaagatgttggtaccacacttcctgtaaagcctacagaaccatgagccaattaaacctctttaatttcttctattaaaaaaaaaaaaggatacatgtacagaacatgcaggtttgttacatagttatatgtgtgccatggtggtttgctggacctactgacctgtcctctaagatcccttccctcgcccaccagcacccaacagccatggggtgtattgttcccctctctgtgtccatgtgttctcaatgttcaactcgcatttgtgagcgagaacatgcggtgtttggttttctgctcctctattagtttgctgaggatgatggcttccagcttcatccatgtccctgcaaaggacatgatgtcattcctttttatggcttcatagtattccatggttttctttatccagttttattccagattttctttatccagtctatcattgatgggcataaatagtgctgcaataaatatacatgagtatgtgtctttataatagaatgatttctattccttgggtatatacccagtagtgggattgctgggtccagatggtttttctggttctagatccttgaggaatcaccatactgtcttctacaatggttgaactaatttacattcctaccaacagtgtaagtgttcctatttctccacaccttcagcagcatctatagtttcctgactttttaataatcaccattttgactggcgtgaaatagtatctcattgtggttttgatttgctctgatgaccagtgatgttgagctttttttcatgtttgttgactgtgtaaacgtcttcttttgaggaggagctgttcatatatgctttgcctactttttgatgggatggtttgtttttttcttgtaaatatgtttaagttccttgtaaattctggatgttagaccttcgtcagataggtagattgcaagaattttctcccattctgtagttgcctgttcactctgatgacagtttattttgctgtgcaggagctcttcagtttaattagatcccatttgtcaattttggcttttgttacaattgcttttggcatttttgtcatgaagtctttgcccatgcctatgtgtgaatgctattgcctaggttttcttctagggtttgtatggttttgggttttacctttaagtctttaatccatcttgagttaatttttgtataagacataaggtagggctccaggccagttccagtttcctgcatatggctagccagtcttcccagcaccatttactgaataggagatcctttccccactgctcgtttttgtcaggtttgttgaagatcagatggttgtagacatgtggtattatttctgagatctctgttctgctccattggtctgtatgttggtcctgctccgttggtctatatgtacaaataccatgctgttttggtcactgtagccatgtagtatagtttgaagtcatctagcatgatgcctccaattttgttcttgtttgcttaggattgtcttgcctatatggggtcttctttgatttcatatgaaatttaaaatagttttttctaattctgtgaagaatgtcactggtagtgtgatgggaatagcactgaatctgtaacttactttgggcagtatggccattttcatgatattgattcttcctatccatgaggatggaatgttttttcatttgtttgtgtcctgtcttatttgcttgagcagtggtttgtagttttccttaaagaggcattcacatcccttgttagctgtattcctaggtattttattctgttttagtgattttcaatgggagttcactcatgatttagctttctgcctgcctattgttggtgtaaaggaatgcttgtgatttttgcacattgattttttattctgagactttactgaagttgcctatcagttcaagaagttttggggctgagatgatgtggttttataaatataaaatcatgttatctgcaaacagagacaacttgacttcctctcttcctatttgaataccctttatttctttctcttgcctgattkccctggccagaacttcctatactgtgttgaataggagtggtgagagagggcatccttgtattgtaccagtttttaaagggaatgcttccagcttttgcccattcaatatgaaattggctgtgagtttgtcataaataactcttattattttgagatatgttccatcaataccgagtttattgagagtttttaacatgaatggatgctgaattttatcaaaggccttttctgcatctgttgacataatcatgtgatttttgtctttggtttggtttatgtgatggattacatttatcgatttgcatctgttgagccagctttacatcgcagggatgaagctgacttgatcgtgatggataagttttttgatgtgccactggattgggtttgccagtattttattgaggattttctcatcaatgttcatcagggatattgacatgagattttctttgtttgttgtgtctcttcccggttttgatatcaggatgatgctggcttcataaaattagttagggaggagtccctccttttcagttgtctggaatagtttcagaaggaatggtaccagctcctctttgtatttctggtagaattcagctgtgaatccatctggtcctgggctttttttggttggtaggctattaattactgcctcagtttcagagcttgttattggtatattcagggattcaacttcttcctggtttagtcttggtagggtgtatgcatcccagaatgtatccatttcttctagattttctagtttctttgcatagagatgtttatagtattctctgatggtagtttgtatttccgtggcatcaatggttatatcctgtttatcatttttatcctgtctatttgattcttctctctttttcttcattagtctagttaacagtctattttgttaattttttcaaaaaaaagctcctggattgatttttttggagggtttttcatgtctctatctccttcaattcttcttttagttatttcttgtcttctgctagcttttggataagtttgctcttgcctcttttgctcttttaattgtgatgttagggtgtcgatttgagatctttttagctttctgatgtggacatttagggctaaaacttccctcttaacagttctttaactgtgtctcagggattctggtgcattgtctctttgttctcattgatttcaaggaacttgatttctgccttaattttgttatttacccaggagtcattaaggaacaggttgttcaatttccatgaaactatgtggttttgagtgagtttcttaatcctgagttctaatttgattgaactgtgttctgagaaactgttatgatttcagttcttttgcatttgctgaggagtgttttacttccaattatgtggttgaattttagaataagtgccatgtggcactgagaagaawgtatattctgttggagtagagagttctgtagatgtttactaggtttacttgatccagagctgagttcaagtcctgaatatccttaattttatgtctcattgatctaatactgacagtggggtgttgaagtctcccactgttatcgtgtcagagtctatgtctctttgtaggtctgtaagaacttattttatgaatctgggtgctcctatattgggtgaatacatattcagaatatagctcttcttgctgaattgttccctttaccattgtgtaatgcccttctttgtcttttatgatctttgttggtttaaagtctgttttgtcagcgactaagattgcaacccgttttgttttgttttgttttgttttgttttgtttttctttccatttgcttggtaaattttcctccatccctttattttgagcctgtgtatgtctgcacataaaatgagtctcctgaatacagcacaccaatgggtcttgactccttatccaatttgccagtctgtgtcttttaattggggcatttagcccattgacatttaagggtagtattgttatgtgtgaatttgatcctgtcatcatgatgctatttggttaatttgcatactagttgatgcagtttcttcataatgtcattggtctttattttttggtgtgtttttgcagtggctggcactggttttgttttgttttgttttttccatttttagtgcttctttcaggagctcttgcaggactgacctggtggtaatgaaattcctcagcatttgcttgtctgtaaaggattttatctctcctccgcttatgaagcttagtttggctggatatgagattctgggttgaaaattctttaagaatgttaaatattagcccccagtctcttctggcttgtagagtttctcctgagaagtccgctgttagtctgatgggcttccctttgtaggttacctggcctttttccctggctgctcttaacagtttttccttcatttcaaccttggagaatctaatgattatgtgtcttggggttgatcttctcgtggagtatcttaacggtggtgttctctgtatttcctgatttgcatgttggtctgttttgctaggttggggaagttctcctggctaatatcctgaagtgtgttttccagcttgtttccattttccctgtctccttctggtactccggtcgatcataggttcagtctttttattaagtcccatatttcttggaggttttgttcattccttttcattcttttttctctatacttgtctctgtgtcttatttcagtaaggtggtcttcaaactccaatatcctttcttccatgtggtcagtttggctgttgatactcatgtattcttcacaaagttctcatgctgtgttttccagccccttcaggtcgtttatgttcctctctacactagttattctagttagcaattcctctaacctttcatcagtcttcttagcttctttgcattgggttagaacatgttcctttacctcgtcatagttttttattacccatcttctggagccttcttctgtcactttgtccatttgatcctccatccagttctgcaccttggagagacactgcgatcatttggaggagaggaggcactctggcttttggggttttcagcatttttttgttgattctttcccatcttcatgagtttgtctagttttggtctttgagrctgctgacccttgcatggggtttttatgggggtctttttgttgtttttggtgctgttgtcactttgtacttgtttttgtttcaatagtcaagtccctcttctgtagggctgctgcagtttcctgggggttcacttccctattcatcttatttgctcctgtgcctggagatgtcactcaaggaggctggagaccagcaaagatgggtgcctgctccatcttctgggacctctgaccttgaggggcaccaacctgatgccagtaggatcactcctgtataaggtgtctgataacccctgttggatggtctcacccagttgggtggcacagggagcaggacctgtttaatgaagtactttattccttgttctagagggtgtgtttcactggggggaaacccactcgtctgagctgcctggattcctcagaactaccaggaggagaggctaagttggctggtctgcagagactgaggccacctccccgatcccccaggggctctggcccagggagatctgaattctgtccctgagcctctggctggagttattggagattgttcagggaagccccgcccactgaggaaggtgggtcagggttagacctgaaaaggcactttggccgcagactgccacagccggtgttttgggctgtggggacaagtcttgggaccaagtggtccagcctcccttgctccagcagggaaaaagcccagcctggagctatacaaatgggtgccacgcttcccctgcccagggagcttagagtgttaggtagttgctagtcccagggctggctgctgccccttccccaaggagctcaaatggcttagacagcaggtagccgcagccagtgctggtcgcctctccccgcaagagttaggtgggcttaagcagattccagctgagaggctgtgagaatctgcacattctagggttgggacgctaggccctggtggaatgggttcgcaagtgtatcttccaatccatgggttgcacagttcaatttgaaaagcacagtttcccctggctgggtagtgtgctcactcactgcctcccttggcttgagggaagttccccttccctgtgtggatcacaggtggaccgccacaccacactgctcttccttctctcagtcagtcatgccagccttctagtcaattttgatgagagaacctggataccttggttgccagtgaaggattcacaggcttattatggtttctttcctatgcgagcctcggaatgctgctgcttctagtcagccatcttggccctgccccctgaacttcttttctttataaattacccagtctcaagtatttttatttttttctatttttttttctatttttttaagttgaagttctagaggtacatgtacaggtttgttaataaattttatgttgctgatccttcgtgtacaaatgaccccctcatcctgtgtagtgagcatagtacctgacaggtagccctaaaaaccatgtctctctccccaccattcttcctcaagcagtctttaatatctattattcccttctgtgtgtccatgagtacccattgtttagctcccacttataagtgacaacatgtagcgtttggttttctgttcctgcattagttcacttaggataatggcgtccagctgcttccatgtttctgcaaaagatatgacttcattctttctgtggctgcatggtattccatggtatatatgtactattcagtccactgttgatgggcatctttgttgactccaygtctttgctattgtgaatagtgctacaatatatatccacatgcatatgtatttttggcagaagaatttattatcctttgggtatatatcatatagtaggattgctaggtcaaatggtagttttaagttctctgagaaatctccacactgcttttcacaatgactgaactgatttacatttccaccagcagtgtataagtgctcccttttctatgcaacctcaccagcatttcttgtgttttgacattttggtaatagccattttgactgatgtgagatggtatctcattgtggttttgatttgcatttcactgacgattagtgatgatgagcattttttcatatatttgttagtggcatatatttcttattttgagatgtatttgttcatgtcttttgccagttttaaaactgggatatttgttttttgctttttgatttaagtttcttatagattctggatactagacctttgttggaggcatagtttgcaaatatattctcccattctgtagattaagttccaggttacatacaggatgtgcaggtttgttacacaggtaagtgtgtgccatcgttgtttcctgcatagatcaatccatcacctaggtattaagcccagcatccattagctattcttcctgatgctctccctcccccagctcccccaacaggccccagtgtgtgttgttcccctcaccaccatgtggccgtgtgttcccatcgttcagctcccacttgtaagtgagaacatatttggttttctgtgcctgcattagtttgctgaggataacagcttccaactccttccatgtccctgcaaaggacatgatctcattcctttttatggctgcatagtattccatggtgtatatgtactaccagtctatcattgatgtgcattaaggttgattccatgtctttgctattgtgaatagtgctgcagtgaatatatatgcacatgtatctttataacagaatgatttatattcctttgggcatataccaagtaataggattgctgggtcaaatggtatttttgcttctagatctttgaggaatcgccatactgatggcaattccagttagttccacaatggttcaactaacttacactaacaccaatgtgtaaaagtgttcctttttctctgcaaccttgccagcatatgttgtttgactttttaataatctccattctgactggcatgagatggtatctcattgaggttttaatttgcatttctctaatgatcagtgatgttgagctttcttccttacgttcgttggctgtgtgaatttcttcttttgagaggtatctgttcatgttttttgtccactttctaatgggtttttttttaattgtgaatttgttttaagttccttatagtctctggatattagacctttgtcagatggatagattgcaaaaattttcttccattttgtaggttgtctgtacactctgatgatatttaaatatttggttgtgcagaagctcttcagtttaattaggtcccatttgtcaatttttgcttttgttgcaatagcttttgaggaattagtcataaatcctttcctggccactgcccagaatggtattgccaaggttttcttctagggttttgattgctttcggtcttacatttaagtctttaatccatctggagtcagtttttgtatatggtaaaaggaggggatccagtttcaatcttctgcatttggctagaatgtcccagcactrtttattgaatagagagtcctttccccattatgtattatagttgactttgtcaaagatcaactggttgtcagtatctggctttctttctggtttctctatccttttccatgagtctatgtctgtttctgtaccagtatcatgctgtttgggttactatagccttgtagtataatttgaagtcaggaagtgtgatggctctttgttttgcttaggattactttgatgatttggacttttttttttttggttcatgccaactttagaatagctttttctaattctgtcataaatgacattggtagtttcacaggaataatgttgaatctgtagattgctttgggcagtatggccattttatcaatcttaactcttcccaatatggtttgaatttgtgttcccagccaaatctcatgtcgaattgttagaggaggggcctggtgggaggtgatttgatcatggaggtggattttctgcttgttattcttgtgatagtgagttcttagaagatctggttgttttaaaagtgtgtagcacctctctctttgttgtcttcctcctgctgcagccatgtacgatgygcctgcttcctcctcaccttccatcatgattgtacatttcctgaagcttcctcagccatgcttcctgtatagcctgcagaactgtgagccaatgaaactttttttctttatgaatacccagtctcaggcaattatttataacaatgcaagaacagactaatacacttccttttcatgagcatggaacatttttcyatttgtttatattgtctataatttctttcaccagtgtctcataactctcctggtagagatctttcaccttcttagttagatatattcctagatatttttgtttgtggctattgtaaatggatttatgtccttgatttgcctctcagcttgaatgctaatgatatatagaaatgctacttatttttgtacatttattttgtgtcctgaaattgcttattggttataaaagcctattggcagcatctctagggttttctaggtatacaatcatatcatctgtgaagaaagattatttgacttcctcttttcctattcgatctcttttctttctttctcttgcctgattgccctggctaagacttccagtrctatgttgaataccaatgttgagaacaggcatccttgtcttgttccagttttcaaggagaatgtgtccagcttttgcctgtttattatgatattggctgtgggtttgtcctaaatgcctctttttattttgaggtatgtttttttgatgcctaatttgttgaggatgtttaacatgaagggatgtttaattttattgaagaccttttctacatttattgagactttcacatatattaaagaccttttctgcatatactgagatgatcatggtttttgtttttaattttgtttatgtagtgaatcatatttatttagttgcatatgttaagccaaccttgcatcccaggaatatggcctatttaatcttagtgcattagttttttgatgcactgctggatttggtttgcatgtattttgttgaagatttttgcatgttcatcagagatattgacctgaagtttccttttttcattgtatctctgccagattttggtatgaggatgatgctggcttcatagaatgagctgcagaagaatctcctctccttgattttttttttttgaatagttagaataggactgacatcagctcttctttttatgtctgggagaatttggctgtgaatccatctggttcagggctttttttggttggtaggctttttattactgattcaatatcagaacttgttataggtctgttccaaattgtaatttcttcctggttcaatcttagaaggctgtgtgtttccaggaatttatcaatgtcttctagatttcctaattgtgtgcatagaggtgttcataatattctctggtgaacttttgtatttttgtagggttggttgaaatgtcacctttgtcacttcagattgggtttatttggatcttcttttttctttattaatctaattaattagcagtttcaatcttgtttcatcttttgaagaaccaacttttgggggcattgatactttgtctggattttcgcatctcagttttattcagttcagctctgattttggttatttcttttcttctgctagctttgggtttggtttgttcctatttttatagttcctcgaggtataatgcaagattgttaatttgagagctttctaacttcttcacgtaggagtttagtgctatgaatcttcctcttaatgcaactgtaactgtgtcccaaactggtatgttgtgtctgttttcattcatttcaaataatgttttgatttctgccttaattttgttatttacccaaaagtcattcaagagtaggttaacatgtaattgtatggttttaatagatcttagtattgattgctgtttttactatgctgtggtctgagaatgtgtttggtatgatttcaatttttttaatttgttgaaactttctttatggtttagcatgtcattgatcttaaagtatgtgccatgtgcagatgagaagaatatgtattctgttgttggatggagtgttctgtagtgtctattaggtctaattggtcaagtattgagtttaagtccagaaaatatttgttagttttctgccttgatgatgtaacactgtcaaggtggtgttgaaatctcccattgttatcgtgtgtttgtctgtatttcctcatagatctctaagaaccttttttatggatctgggaactctaattttgggtatgtatatatttagaatagttaagtcttcttgatggattgagccccttattattatgtaatatttttctttgttcgattgttgttgctttaatgtttgtttgtctggtataagaatagcaacccctgctgtttctgttttctatttacctaatcaatctttctccattcctttactttaagcctattgctgttacttctgagatggatctcttgaagacagcaaacatttgggtcttgcttctttatccgccttgacactctatacyatttaatcgaggcatttagcctgtttacattcatggtcgatattgctatgtgaggatttggtcttatcatcaygcttttagctggttgttatgtagacttaattgtatagttgcattatagtgtcaatggggtatgttcttaagtgtgtttttatggtgacaaatattgctctttcatttccatgtttagcacttcctttaggagctcttgtaaaacaggtctactgctatcagattcccgtagcttttttgtttttttaaggtacactcttgctctatctatctccccagctggagtgcagtagtacaatctcagctcactgcaacctctgcatcctgggctcaaatgatcccacctcagtctcttaagtagctgggactacaggtgcatgtcaccacacctgggtaattttgtatttttttgtagggatagggtctctctttgcttcccaggcttgtttcaaactcctggggctcaagcaatctgcccacctcagcctcccaaaatgctaggattataagcatgagccactgcagtcagcctcccttagcttttgcttgtctggaaagaattgcgttctcttttgcttatgaagcttagttggtgggctataaaattattgcttgggatttcttttatttaaagatattgaaaataggctcccagtctcttctggcttgtaaagtttctgcggaaaggtctactgagcctgacagagttccctttgtaagtgacccgccgcttctctctagttacctatacgattttttctttcacatctaccttggagaatctgatgactgtgtgtcttggggatggttgtcttacatagtatctcacaagggttctctgcatttcttgaatttacatgacaacctctcactaaagccatagtgtctatattattttgatgtaagttgttaaattattattttttactgctaccacaatactgctgctgttgctgctgctacattaatttatgttgctatgtcattccagtgaaaaatctcaactttcaattatagtgcagatacactatgtaaaatcacatgtttaggttccaagtaatatatggcctaaagaaatcccaaaaatggtaataatcccagtcatggatgccatacacttctaacctgcagcatccccactcaagaactgcctgcctatggtgcctcccactggagcacttcctacccacagcacctgagctgccactgccagggcacctacctatggccccctgccatcctctacagagctattgttttatacatcttacacattagaaaacttagactcaaagttaatctcatttgcctgtgtcagagccaggattgaaacaccagtctgtatgactctataaatcacacccttaactcagtgagctccgaaggcttttgagtgtgaatgctgccacatatcctgttttctaaaacaggcttattctgactttcacagatcacagtgttctcccagtgtgtgaaagcaagacctgaaataaacttttatgctgtatgtgctaacatgcttagggctctattttcataaaacattaacaattttaaagatgatatctaataaacagaccttgtataattatctttttaagattgccaaatgttttctaatatcttactcattgtactaaaccctaggcttctgttcattttaattttaccataaaggtaaaaacatatatataagtcaataggtaactcatttctttcattaaataatcaattaaatacgtcatctatgatgtacaaggcattgtatagaacactatattgccaatcaaagtgctagtaaaaataaaagtttaaaatgtgaaggcaatctygaagcatgactattcagattatttattgctactagtatcatatatttttattaaagagccatcacattccaaataagtcagtcaatatcatacttatcagaaaccagatgctatgataaataattctttcttcttcacgtcctccatactcaggcatacttatagacaattactgaacaaattatatgctcagctagtatgcttcaatccaacattaggaaatcgtttcaagaaactgttttaaacatttttatagcaatgtatctttaatacttttctcagcatggggcagaagagaactttacatatttacttgcatgtactttacatctttttgtctgctgtacagatctgtaggcctattgtttttccttcccactaattttgaagtgtctcagtttaaagcatatttgttggaattatattatgtatccatggttgtcctggataccttttctttgccccacctcccatcatagatctattctccatccttttttaccttattcaccccaggaagctaacttccatgtctcctggcttccagttgttaaccagtcgggagctctggcaagctataggagagaatggggacagaatatttctcctgctgtgcccttccctccagaattatgtcaggttggcttgtccctctgttgaagggtaacacttctctccaggaagccttctctccacaacacatttaccaacaactggtccctctggctgtagggatggcaacagctctgcttttgctagccccaggtaactgcactatctcttatgattctcttatatagcacctgtaccttcataattaatgtctttataagtgagcccccctcagtttattcttagggctaatttgtacctggactgttatttggataagggtagtatctaaatacatgaatcttttagtcaacctacattggtttctgtgttctatttcttaccagctgtgttaatttgcacaaattatttattctaagtcatcataaaaggggctaaaaatacctacctcacagaattcttgtgaagattttagattaggcatatatggttcatcacagagcctgatactagtgagcactcagttaacatcaactattaattttgttttctagtacttatttacatacatgtaaatttaataaatactattttatcttatgtatgatgataataaaaaagttctagaatttgagccaatcttccattccttcatagaaagtttttttaaaaagtagaaaatgtactatgttggaggtctgttccaagatggctgaataggaacagctctggtctgcagctcccagtgtgatcaatgaagaagacaggtgatttctgcatttccagctgaggtacctggttcatctcattgggactgcttggacagtgggtgcagcccatgggcaagctgaagcagggcagggcattgcctcacctgggaaacgcagggggttgggggatttccctttcctagccaagggamgccatgacagaccgtaccaggaaaattgggacattccascttaatactgcacttttccaatggtcttagcaaacggcactccaggagattatatcctgtgcctggctcagtgggtcccatgcccatggaaccttgctcactgctggcacagcagtctgagatcgaactgtgaggcggcagcctagctgggggaagagtgtccaccattgctaagacttgagtgggtaaacaaagcagccaggaagctcaaactgggtggagcccaccgcagctcaatgaggcctacgtgcctctgtagactccagctctggggcagggcacagctgaacaaaaggcatcagaaacttctgcagacttaaacgtcccagtctgacagctctgaagagagcagtcgttctcccagcatggtatttgagctctgagaatggaaaaactgcctcaagtgggtccctgacacccgtgcagcctaactgggagatacctcccagtaggggctgactgacacctcatacacccaggtgcccctctgatacgaagcttccagagtaaggatcaggcagcagtatttgctgttctgcagtatttgctgttcttcagcctccgctggtgatacccaggcaaacagggtctggagtggaactctggcaaactccaacagacctgcagctgagggacctgttagaaggaagactaacaaacagaaaggaatagcatcaacatcaacaaaaagggcatccacaccaaaaccccatctgtaggtcaccatcatcaaagaccaaagatagataaaaccacaaagatagggagaaaccagagcagaaaagctgaaaattctaaaaaccagagcacctctcctcctgcaaaagattacagcttcttgccagcaacagaacaaaggtggacggagaatgactttgacaagttgacagaagtagccttcagaaggtcaataataacaaacttctccaagctaaaggaggatgttcgaacccatcgcaaggaagctaaaatccttgaaaaaggattagacgaatggctaactagaataaacagtgtagagaagaccttaagtgacctgatggagctgaaaaccatggcacgagagctatgtgacacatgcacaagcttcagtagctgattcgatcaagyggaaagaagcgtatcagtgattgaagatcaaattaatgaaatgaagagagaagagaagtttagagaaaaaagaataaaaagaaacgaacaaagcctccaagaaatatgggactctgtgaaaagaccaaatctctgtttgattggtgtacttgaaagtgacagggagaatggaaccaagctggaaaacactcttcaggctattatccaggagaacttccccaacctagcaaggcaggccaacattcaaattcagaagatacagagaacactacaaacatactccttgagaagagcaaccccaacacacataattttcggattaaccaaggttaaaatgaaggaaaaaatgttaacaggcaccagagagaaagattgggttacccacaaagggaagcccatcaaactaacagcagatctctcggcagayactctaccagccagaagagagtaggggccaatattcaacattctcaaagaaaagaattttcaacccagaatttcatatccagccaaactaagtttcataagtgaaggagaaataaaatcctttacagacaagcaaatgctgagagattttgtcgccaacaggcctaccttacaagagcccctaaaggaagcactaaacatggaaaggaacaaccagtaccagccactgcaaaaacatgccaaattgtaaagactatcgatgctaggaagaaactgcatcaaataatgggcaaaataaccagctagcgtcataatgacaggatcaaattcacacataacaatattaatcttaaatgtaaatgggctaaatgccctaattaaaagacacagactggcaaattggataaagagtcaatacccatcactgctgcattcaggagacccatgtcacgtgcagagacacacataggctcaaaataaagggaaggaggaagatctaccaagcaaatggaaagcaaaaaaaggaagggkttgcaatcctagtctctgataaaacagactttaaaccaacaaagatcaaaagagacaattaaggccattacataatagtaaagggatcaattcagcaagaagagctaactatcctaaatatatatggaccctatacaggagcacccagattcataaagcaagtcctagagacctacaaagagacttagactcccacacaataataatgggagacttcaacatcccactgtcagtatgagacagatcaacaagacagaaggttaacaaggatatccaggacttgaactcacctctgcaccaagcacacctaatagacatctacagaactcttcagcccaaatcaacagaatatacattcttcttggcaccacattgcctttattccaaaattgaccacatagttgggagtaaagcactcctcagcaaatgcaaaagaacagaaattataataaactgtctctcagaccacagtgcaatcaaactagaactcaggattaagaaattcactcaaaaccacacaactacatggaaactgaacaacctgctcctgaatgactactgggtaaataatgaaatgaaggcagaaataaaggtgttctttgaaaccaatgagaacaaagacgcaacataccaaaacctctgggacacatttaaagcagtgtgtagaaggacatttatagcactaaatgcccacaagagaaagcaggaaagatctaaaatcgacaccctaacatcacaattagaagaactagagaagcaagagcaaacaaattcaaaagctagcagaaggcaagaaataattaagattagagcagaactgaaggagatagagaaacaaaaaacctttcaaaaaatcactkaatccaagagctggtttgttgaaaagatcaacaaaatagatagaccactagcaagactaataaaagggatatcaccaccgatcccacagaaatacaaactaccatcagaaaatactataaacacctctacacaaataaactagaaaatctagaagaaatggataaattcctggacacatacatcctcccaagactaaaccaggaagaacttgaatccctgaacagaccaataacaggctctgaaattgaggcaataattaatagcctaccaaccaaaaaaagtcgaggaccagatggattcacagcccaattctaccagaattacaaagacgagcgggtaccattccttctgaaactattccaatcaatagaaaaagggggaatcctccctaactcattttacgaggccagcatcatcctgataccaaagcctggcagagacacacacacaaaaargagaattttagaccaatatccatgatgaacacccatgcgaaaatcctcaataaaatactggcaaactgaatccagcagcatatcaaaaagcttatccaccaagatcaagtcggcttcatccctgcaatggaaggctggctcaacatacacaaatcaataaacgtaatccatcacataaatagaaccaaagacaaaaaccacatgattatctcaatagatgcagaraacacctttgacaaaattcaacagcccttcatgctaaaagctctcagtaaactaggtattgatggaacgtatctcaaaataataagagctatttatgacaaacccacagccaatatcatactgaatgggctaaaactggaagccttccctttgaaaactggcacaagacagggatgccctctctcaccactcctattcaacatagtgttggaagttctggccagggcaatcaggcaggagaaagaaataaagggtattcaattaggaaaagaggaagtcaaattgtccctgtttgcagatgacatgawtgtrtatttagaaaaccccatcgtctcagcccaaaatctccttaagctgataagcaacttcagcaaagtctcaggatacaaaatcaatgtgcaaaaatcacaagcattcctwcacaccagtaacagacaaacaaccaaatcatgagtgaactcccattcacaactgctacaaagagaatgaaatacctaggaatccaacttacaagagatgtgaaggacctcttcaaggagaactacaaaccactgctcaacaaaataaaagasgacacaaacaaatgaaagaacattccatgctcatggataggaagaatccatatcgtgaaaatggccatactgcccagggtaatttatagattcaatgccayccccatcaaactaccaatgactttcttcacagaatggaaaaaactactttaaagttcatatggaaccaaaaaacagttggcattgtcaagacaattctaagccaaaagaacaaagctggaggcatcatgctacctgacttcaaactatactacaaggctacagtaaccaaaacatcatggtactggtaccaaaacagagatatagactaacagaacagaacagaggcctcagaaataacaccacacatctacaaccctctgatctttgatagacctgacaaaaacaagaaatggggaaaggattccytatttaataaatgatgctgggaaaactggctagccatatgtagaaagcttaaactggatcccttccttacaccttatacaaaaattaattccagatggatgaaagacttaaatattagacctaaaaccataaaaaccctagaagaaaacctgggcaataccattcaggacataggcatgggcaaggacttcatgtctaaaacaccaaaagcaatggcaacaaaagccaaaattgacaaatgagatctaattaaactaaagagcttctgcacagcaaaagaaactaccatcagagtgaacaggcaacctatagaatgggagaaaatttttgcaatctactcatctgacaaagggctaatatccggaatctataaagaacttaaacaaatttacaagaaaaaatcaaacaaccccatcaaaaagtgggcgaaggacatgaacagacacttctcaaaagaagacatttatgcagccaacagacacgtgaaaaaatgctcatgatcactggtcatcagaaatgcaaatcaaaaccacaatgagataccatctcacaccagttagaatggcgatcattaaaaagtcagaaagcaacaggtgctggagaggacgtggagaaataggaacacttttacactgttgggggtgtaaactagttcaaccattgtggaagacagtgtggcgattcctcaaggatctagaaccagaaataccatttgacccagtgatcccattactgggtatatagccaaaggattataaatcatgctactataaagatgcatgcacacgtatgtttattgtggcactattcacaatagcaaagacttggaaccaacccaaatatccatcaatgatagactggattaagaaaatgtggcacatatacaccatgaaatattatgcagccataaaaaaggatgagttcatgtcttctctagggacatagatgaagctggaaatcattctgagcaaactatcacaaggactgcaaaccaaacaccacatgttctcactcataggtgggaattgaacaatgagaacacttggacacagggcagggagcaccacacactggggcctggtgtggggtggggggatgggggagggatagcattaggagaaatacctaatgtaaatgaccagttaatgagtacagcaaaccaacttgtcatgtgtatacatatgtaacaaacctgcacgttgtgcacatgtaccctagaacttaaactataataaaaaataaaaaataaaataaaaagaaattgaatatctaaatagatagacatcccatgttcatgtgttggaataattgttttgatgacaatactacccaaaacaatgtgtaacttccatgcagtacctataaaaatcccaattgcattttttaattaaaaaaatccatactaaaattcatattaaatttctagggacccataatacccaaaacaatcttgaaaaagaacaaagtcagaggactcatacttcttgatttgagaatttactacaaagctatagtaatcaaaacgatacaggcataatgatagacatatagaccaatggaattaaattgagagcccagaaataaaccctcacgtctatggaaaattgatatttgacaaaggtgccaagaccatttagtgagaaaagatagattattcaacaaatggtgctgggaaaactgaatatccacacgcaaaaaatgaaattggacccttacattaaaccatatataaaatttaactcaaaatggaccaaagactaaatttacaatctacaactataaaactcttagaggaaaatgtggagataaatcttcataaccttggatttgacagtggtttcttacatatgacaccaagagcacagacaacaaacagtaagttggacttctaaaagtaagaatttgtgcttcaaaggacactttgaagagagtgaaaagacaacccataaaatgggagaaaatatttgtaaatcatatgcctgataaggacttaataccagaatacaaaatcaatatgcaaaaatcagttgtatttctattcactaacaactcctacagctcaacaacagacaacgatattaagaaatgggcaaaagacttgagtagacatttctctgaggaagatatacaaatggccaataagcacatggaaaagataatcagtatcattagtcattagggaaataaaaattaaaaccacagtgagatagctcttcacacccaagtgttggcaaggatgaggagaaattagaaccctggtgcattaatagtgggattgtaaaatgatgtagcttctatagaaaatattttggcacttgcttgaaaaagtaaatatggaattgccatatgagtcagtaatttgactgctagatgcttaccaaaaagaattgaaaacagggactcaaacagatattgtacaccaatgttcattgtagcattattgacaagtcaaaggtggaaacaacccaagtgtctatcaacagataaattaataaacaaaaggtagtatatacagtgtaatgttcagccataaaaagacacgaagttctgatatttgatgcagagtgaatgaaccatgtaaatattatgctaagtataatccacatataaaaaggacaaatattgtataatttcatttatataaaatatcaacaatcagcaaattcatggagacaggaagtagattagtggtaccacgggctgggggagggaggaatggaaattaatgcttaatgagtccaaagtttctctgagatgatgaaaaaaattggaaataactagtggtgatggttgtacagtattgcaagcgtacttaaaaccactgaattctacacttaaaaatggttaaaaggaaaaattttatgttatatatgttttacctcaattttttcaaataaggtatagaatttaatgtgttcaggctaccctaatatcacccgcttatctgagccctacactttctgatcagtagtagtgaagaagttttcataagagttgttctgatgaggtcttttttaacctctgaaggtattttgggtttttttttaagtgaatcttcggaaactaacagcttttcttctaagtgaaaatcagtgtgctgcagctggcagctgacagcattaaaatcatccatttgacatacaaattagtactggagtgtcttttgtcatacagatatgcagaaattactatacagtgaccagatgtattggatatattatctaaactcacatagaagacagaatggatctgagaaatacagcttattcatgtgcctgaataagtattatataatcagaagccatgtgataccattttaatatgtattcattaactatttcctgtaattacaattgattagcggtttattgctataagatggtttctttacaattaccacttccccttttgtatttgtatttggccctgcttccacattaaatacatcagaaaacctttggaatctgccattttttatctagataaaacattgcttttcaccagaacagagtaaagaaggactgcaaagatcttagtttacttaaggtaccatgtagaggcttctctaggccagaatttagtcttgctaaatcccacttgtcagttattccttaattcactttatcttaaaggttaaataaagcaatgagctatagtgtatagtataatcaagtatagtcaaatatgctgtaagcaaagctatattactaagtcttaagaaaaatcagataatctctaatgagtgaagtggagtcctagatctctgaaatgtatggtactgttcacagggtagacccgtttttgtgctaatccttgttgctgtatggatgagtttaatttgacaagccaaacaaatgtcgactgcatctattggtaggaagacctttgtatcaaaacaagcatgaagtcaattcaagcctttattgtgtcacatttaaaatgaaaaacacggcaaagtctcactcttgtgctgttgcaaaaataatcgttttttaaaaagtcatgtgagatattacatctttggctactaaactgtaattagattctctgggcttagaaacaaaacatgccagcaggatatatacagagagccccagaaagatacctcttacaaaactgaagcatgctgaattaatctcagagaacaagtatataaatctgggaattgaagcaataactattcagatcaatagggagagctagtctaccatatcatgtattaagtaaacaaggatataaaaaggtacatttttatatccttgagcagagtgttcagatataaaggagaatttttattttgacattaatcaaatgttacctagtggaaaatgtataatttgttttgatacccatggcaaccattacccacattaccctacttctaacataaggtcaaagtttcagcttgtaaaaactccatagtgaatccatctctttcctgaaagtaaatcgtgatgtttagtaagaataatgagttggtaccatagcatgcttaatgtgttattgtgctgttttcctccctgtgggaaaataaggtaatgggatgcaactctagagacagtgatgggtctcagactggaaaactggccaacaacatagaatagaagaaattgaaagctccaattagtgtttttataactttagttttaagaaaaagtgtaaatgtcttattggtatgttagtctctgaaactcataagactaaaattaattattaactatatctagataatattttgtgattatgagaccactaatattttatccccaacagtgtatcacattcaaaaggatatctacaaaagaaactggaggaatctttgcctctcactttgtcttatcttttcagaaaatattagagacagttcatcttacccttaaattgttatattcttggcacaaagttaatacttttcttttgttatcaaaagaaatattcatctaaacatatctagttgcaggcagatgggcaattattctttaaagcaaaacaaaaaatagaaaagagtaatgtatatctgaataatattttattcttgtctagaaacctagacaagagacagtttatgtggatattctatcactaaacagtgtgagtaactgatactttctacatgtggcatgtaataattaagtttaaaatgtgatttcagttgtttttaaataaaaatgatcagattcataataagcaagacatgccattgcatctactttttaaaataaggtaacaacccaattgtgttaatttacactcccctgtagccctagtatatttgatctgtagatgataggttggaagttaatttgtgttgtggtaatatgaggcttttcccccctctcccggctccccattacttcctggattccttaaccaagctaaaccaagttttaagatattgtggtgatcattggtagcctttaccttttgctagtctctttgttcattcaggctacaagaacaaaataccaaagattgggtggcttataacaatagaaatttatttctcacagttctggagactaagtccaagataaaggctctggtaagagcccacttcatagttcatatatggccatctttatgctgtgtcttcatgtggaagaaggggcaaggaagctctctcaggtcctttttatcaggtactaattctattcatgaagggtctcccctcatgacctcatcacccccaaaggccctccctcctaatatcattaccttggggttaagattttaacatatgaatttggggaagacacaaacattcagaccgtggcacccttctctctttagccctgtcaccttcccccctttgctcaagctcttcctctagcctttggtctcaggcacctgagattatccttctacaattatgtgttcaaaagagtcaaaataacttcataagacactgtaaaccaattcagcatatgtgttgtccctgtattaaacttctctagctccagatagtatctatctagttcttcagattaatatgatacttctagaacttctaaacgtgtcatgggtctttttacctgttctaaaatttattagacctctttataccttaagcatttagttaaagaatgagaagtgaatatcctttatcagcttcaagtatgcaaggaattctttcttgatcttgttatacctataagcactggctatggttaaacttggctttcttcctgacatttttcttgccttgctcgtcagcaaatgttttagtctgtaggtttatattagattataagaaaatagtttatatattaatgcaccttgaacatgctggacatcatataaaagttgggagtaacagtggaaactcttctacataactctgatttgttaagtgataaaagattacttcgaaagactcatgaactaaaaactcctgttgagtccttattcttatagcttttcataagttttgtgtagtaaaaagcaaagtagtagtgaagagggccttaatacacctaatccagacattggttttcttggttttttaacatgtttactagaaatattatatggtaaaatataagcagtttttaaaaagagagagcaagcttttttccaatttccaggaaaaactgcaaagtcatcatcttaatcttgtgatctttggcactcacatttgtgacctgacacaggatgaaagttatcttgtctcaatatgtgttattctacatacccaccctgtactccacagcccaccatttaattactccttaccacaggaatgtctgtggctgaataagaaactaaccatagttgccctcccatttgacccacagaggttggaacttggctgtgatccatcatagtcctaactgttttttgaatctcagtttttattgtatacattcttttcagggcatagcgtactttgtgtaatatgaccagtggcttgaacacagtgtgggtttactagtctcagttgtctagtgtaaacagaagctgataaatgcttgttgctgaaattcagttcccaaatgtcatagatcaaaagaaaatttaccacaagacttattagggctcctgatacaaaatgatattagatgatggaattttatcagaagagccttgtcttctcacataagccagtgcatgtttttaagaacaagaattgttttcaagcaaacttttctatcatagtttgcttttcaaaaaaatttccacatagccatttctggaaggacttgtttaaaagtagaaactattattaatcactaatctataaatctataggaagatcctaattgccatattcacaaacactaagtcactaacataattttaaaaattaaaacatagtataaaagaaaactttttaacctggagttcatcatgaatttcaggaggtttttgaactaattgaaattatgtgtaaagtgttccacataaatgccattttttgagacacaatattcatagtctttatctgattgccaaagcgtttgtgacccagtacattaagagtcactggtaaaaatcactcctccatcataaagagttcaccatgaacaccataaagccgtatctcacattccatttggggacaagtttgcattttacatttgaatctatgcgtttgcaaagtgttgtaaatttctctcctataaaaggagtgattaaggaaaggataacggaagaagagaggatagaaggaaaccatcttgtaataaggatctgcctgtgaatcgggcatatacacacacacacacacacactcacagaaacacaggcacacctcaaagatacggcaaattcagttccagaccaacccaatgaggcaaatatggcaataaaatgcatcacacaatttttttgtctcccagtgcatataaaagtggtttacactatactgtagtctagtaagtatgcaacagcattatatctaaattaagtacatacataccttaatcaaaaaatgctttattgctaaaaaaaaaaaaaaaaagtatgctaacagtcacccaagccttctctaaatcataatcttttcactggtgcaaggtcttgcctccacactgatagctactgactgatggttgctaaaggttcctaaagggcaatggtggctaaagattgaagtggctgtggcaatttcttaacataagacaacaatgacgtttgccgtatcaattgactcttcatgaaagatttctctgtagcatgcagtgctatttaacagcattttactcacagaagaacttctttccaaatcaagtcaatactctccaatcctgttgttgctttatcaaataaatttatataataaatgctttgttgtcaaaaatgacacagcatcttcaccagaagtagattgcatctcaagaaaacacttttttttttgcacattcataagaagcaactcctcatccatccaagttttatcatgagattgcagcagttcagccacatctcaggctctgcttctaattctagttcttttactatttccaccatatctgcactttctacctccactgaagtcttgaactcctcaaagtcatccatgagggttggaatcaacttcttccaaactccatttcatgttgatattgtgacctcccaagagtcacaaatgttttgaaaggcatctagaatggtggattatttccagaggatttcaatttattttgcccagatgcatcagaggagtcactatctatagcagctacagccttacaaaatgtatttcttaaagaataagacctgaaggttgaaatgactccttcatccatggattgcaaaatgtgttagaatgcatgaagacaacattcatctctttgtatgttctccgtcagagctcttgggtgaccaggtgcattgtcaatgagcaataatattttgaaaggaatctttttttctgagtagtaggtcacaacaaagaacttaaaatattcagtaaccatgctgcaaacaggtgtgctgtcgtccggactttgttgttccatttatagaacacaggcagagtagatttggcataattcttaagggccctaggattttggaatggtcagtgagtattagcttcaactgaaagtcaccatctacattagcctctaacaggagagtcagcctatcctttgaagccttgaagccaggcattgatctcttatctctagttatgaaagccctagatggcatcttcttccaatcaaaggctgcttcatttgcattgaaaatctgtttagtgtcatcagcaatcttagctagatattctggadaactgcagtttctccattagtacctgttgcttcaccttacacttttagttatggagacagcttcttttcttaaagctcatgaaccaatgtctgctagcttccaacttttcttctccagcttcctcatctctcacagccttcatagaattggagagctaaggcctggctctgcagatggtgattaagagaatggtgtggctagtttgatctcctatccagaccacaaaaactttccctgtatcagtaagaaggctgttttgctttcttatcgtttgtgtgttcactggagtagcacctttaatttcgtttaagaatttttcctttgcattcacaacttggctgtttggcccaaaatgcccaacttttgggctatcttggctatcaacatgccttcctcactaatcttaatcttatttctagattttttatttaaagtgaaaattatgtgactcttcctttcatttgaacaccaaaggccattttgaggttattaattggcctaattttaatatttttaatatttttgtgtctcaggaaatagggaggcttaaggagaaggagagaaacagaaatggctattcagtggagcagtcaaaacacatttattcactaagtttgccatcttatataggtatggctcatatcccccaaagtaattacaatagcagcatctgagatcacttatcacagatcatcataacagatataataataatgaaaacgtttcaaatattgcaataattactagaatggaacttagaggtatgaagtgagcacatgctattgtaaaaatggtaccaatagacttgcttgacacaggattgccacaacccttcaattggttaaaaatgcaataattgtgacatgcactatagcaaagcacaataaatgaggtgttcctgtatatacaatttttccaacaaccctctaagtgtactgtttaactgaattattattacacatttaacaggtaacaaaactaaggccaaaaaggctaagaaacttggccaagatcccacagctgacaaatggcagagtagtgattcagacccagggctatctgtctacaaagttcctacactttcctccaaaccacccagcctgtttatttgaagtagtattttatccttcttgactaatggcaagaaattatatgaaaaagtattatttgacttattactctgttaactaggtctaaaattatctccatctttactgcacaactgttttcactcaggttgctgatatcttgtacctgacttattgaaagacttactgcagctccccactgttcctgcctgcaacttcccatccctcacttctgccctacactagactgagctttttgaaatgtaaatttgatagttgccaaaataccctatgactagttgctaaaatatctatgactttccgttgccttcaaaatgaagttcgaatcctaatcatcttttataaggctctccatgatctggattctgctctgtgttccaaggtccttcctggccgctgctccctcaccctcttaggtttcagccataattacctacttgcagttccttatattctctttttgtttttctcctcatttggagcattattcccacttctgttaatctaggtaactcccatttgttttgaaatgctgtttatatagcatttcttcatggaagtcttccttaacaactcaagtctggaactaagtatcactcttaaatcctcatagaaaatcttttacttagtttacatatagagagcaactttatttatgcattagataaatcccatgcttccttcagggaaatacagcaccatgtgagggcacaaagcttagaaaggaarggatgggcaacttttcatgctccacttactccctttttcaggctttctcgtacaaggcacaatttgaacaaccataaatgatggctctaggtagcatttatcaaatggtattgtaatcacctgtttacttattcatatccccatctagttcattaaggagagggactatgttgcattgttatatccccagcccctagcatggtgcctttcaaatagaaaacactcaataaatatttgataggcaaattgattaagttaatgaacaaagcatgtgaaaataatagtttgcagtagactacacctttgcacaagttgccctaaagagaaaggcaaaagaaaaaacactagtgtcaagtactagtttaattcaggacaatgaacagtgaatgcctacaaatggaaacttgtgaggcaagagaaatgaaaaagatatagtcccttgctctcataaaactttcagtcttgttaggaagcttagacatgtatacaaatgattaaaattgaaggcagaatgcaacattgtgacatgtgctatatgagatttataattaaagttctggaaatagtactgcgaaggaagaaatttcatctaagtgaggaattctgaaagctttacagagagggtgataatagacctagaccttcaactatgggtaggatttcagtaatacaaattgttggggaggaccacagtcaggagggagtatttcaagcaaaggaaacagcacagtagcattggaaagcacagggcttctttgaagagyagtttggctgctgataaagctggaaaggtacggagaatctgattatgatagaggaccttgagtgctatgttaaagagttttcattttagcagtcgggagctattaaaggtttttagaaaaggaaagtgacactatcagctatattttggaaagtcgtttggaaaataacttttttatttgtattaaggtttgccaaaatttaagcatcttccctttcttttgcccttgatcccaattaaacaaattttaaaacaccaaggaacagagattttccctaatactcccagtctatctcaatgctagattcttacctttacattgaccctctctcttaagctttcagtctctcactatctaaatagttggtagccctcagagtgaacaaagctcacamggctgtgaggaagagacaatagaagggtttgcctgagactcatagccaaagctctgtgactttcaaaatgagactggggaaataatcccctgctgttactatgtgattcaaggcacctggtcactttctttccttactttctttgtaacactaaaggacagtcttctcttcttgttaacctttcatgtaaatataagttaatgtatgtatttgtattaggagtaagcaagtgtgtgtgtaatgaatttgtctttcttgaaatgcaaagggatgttagacttaactattatcaaaatgtaacttccaaaaagaaattttaaatagtacacattgtctttactatggtaagcaaactatttcttggaagggatccatggatcttgacttactttgcttaaggacaataaccctagtaaggaagaaatctctgtatgatactgactgaagtctcaggattttctgagaaccttccataatgttaccaccagtcagcagagaactggatgaggaaaacctagaagcattaggaccacttaggaactaatccaacaataattggactctaaaatgaagtagaagaagaatgaaaaaaaaaaaaggaatggatacaagacaagtcctaaattgacacagctttgtaactaattaaatgtgcagacaaaggaggtttaaaatatatgtgtatatctatccacatctatctatctatatttatatataaagagagagagagatacttagagacagatataagaacttggctgggtgtggtggctcacacctgtaatcctagcactatgggaggctaaggaggaaggatcacttgatcccaggagttcgataccagtctgggcaacaaagcgagaccttgtttctacaaaaaaaaaaaaaaaaattaattaaaaaaagaccttaaagtctccaggttgggtgtttggggaggttgctgatactgttaccagagatagagaagagaagaataacgtaggtttgaaaagaatgtgattaattttggacatattgaatttgaagtgctaatggtacatcactggaaaaataatcagctgagcatttggagattcagactagaattcaaagaagacttctactagatgtgtattgaatcctcccacttatgtaataaacagtattctacagaacatgaaaaaaaggtgtagggcttcattttccataattatcataattatggtataattttccataatttccataattacctttaaaagcttataaatgaattattctagaaagaaagacaaattccaggtgatagtctcaataagagattgttgaaaagacccttaaaagatatattaataacttgtatttgtttcagagattgttgaaaagacccttaaaagatatattaataacttgtatttgtttcaagaaaccataaaaattgactgtctccattataaattagcttaaaaataagaraaaaattgcataagtgcaagtgattagtagaagaaatttacaaagaaaatragatcaaagggaactagaagagaaaggaaaggaaaagaccattttgacatgttagaagaaaaaaaattatatatatgtgtgtgtgtgtgtgtgtgkataattgaactttcaacaaaccaaactatgaagttgcattgactcacactcatgctaagatgttatgcaccataggaaaaatatttatttgtcttgacatttctatttaaaacttataatttaaaaattttaaattatctttctttcctttaatccttatgagattttgttagaattacatatgaaagtaaaataggagaggaaaatttataattgttcatgaagatatccatttatctttttttttcacacttctattgagtgatccactaaaaattgccaaactcattgagaaaaaagtaactaagaaagcacggggcttctttgaacagagcagttttggctgcagacaaaggtagaaagatatggagaatctgattatgatagcatggagcctaagagtagaaagtaaaactttcactgcatcctctctaaactcttctatctacttctcttccttaactgtggaaatgaagtgaggatattgtctatcatgggtggatatagatgatatgttacatatagtaacatatgtcacaagcatttattatttctatagttataaacttcatcaaaattattgtataaatatatttttgtgtagatgtcttttacctaagatatcattttaaaaaatcatcttgcctgttcaactcatacaagagttgggtgaagactctattagtaaaagataaaagcaactagcatttgactcttaccagagccagtcagattccttactatttgctctaaaatcctttctgcctcctccactggaagtaaaacagcttaaccagtccctagcatagtgcctgacacacagtagatgctcagaaagtatttgttgaatgaatgaatcagttattcaacatatattagagcaaatactgtgtactagcagtcactgttctaggcattggagaaacagtaacaagtaaaattaagttcctactgtcatggaacttacaatatttgggagagaccatcaataaacatacatacatatatatagtttagatatatatataaagtggttataaatgatcaaataaggttaacacgaggaaaaagagtgctgatggcttcttttctttgtagagtgattaktggagctcttattctgagatggaaagccaatagaagatgtggaacaaagggtgttatatcatccgactcatattttaagagaatcattcttttgatgattgtcatgtagagaaagattatactgggcaaggatagaagcagtcattcaagaagttcttgcagtaatctaagtaagagatgatggtggtttggactgggagatgagattagagaggtagatgatggggagttggggagttgggaaattgtttgcagatttgcagatcatgtaagacctcatagactatggaaaagacttaggaatgtattctgaataaagctacaggccgttaaaatgctttgtgacaggttatgtgaaatgtctgtcttatattttaaaaggatcactcacgttgtgtgagggttagaccatagcggaaagagtggaggcaggggagaccagttgataggttgttaacaataatctaggtaagaaataaccatcacttgagctaatacaatattagtacaggcagtgagaagtgatcagattctraatatgttttgaaagttacaggatacattggtaaagaaaaaaagaaacatatccaggtttattagttagataactagaagactgaaattgccatttcctgagataaggaagacttcaggagaggattgggtagaggagggtaggaatcaagtgttcccctttgaaactgttaagtttgtgaagcctagtagatatcaaagtgtctaatagatgttgaggaagcagattcatgagtttaaattccagggaagatagtaaagacaaatttacagtcatcagtgtatagataggacttaaacctgtgggactaaatgaaatcatttaggggaggaatgtagatagagaagaggtcagaggactaagcaatggagcacgaagtcaaaaagataagataaatccaccaagggagatgagaaggcacagctagtgaagtagtagaaccaggagagattggtgtactgaaggctaatggaagaaagttttgaagaaaggagggcatgatcaaatgtgtcatatgatgctgataggccaagtcagattcagaatgagttttaaaaattggatttgacaatgtggagattactgccagtcttaataagagtattttgggggagtggtagagacaaaagtttggggagaatttgagagagaataggcttcttgcaaagaaatgaaaagagataggacaaaccattagattaaaagagccttaaaagatgtccgtcagtcacagtgcgtggcccttgtttggatcctgactcaacaaatttaattatggatgaacagatggatagacaaagagagggaggggaagagagagagaggacgtttatgagttatgagctaattcaaaatttgaacacttgctgaatatttgattatattttacaggaagagtattattggggcttttttctaggtgtgatagtactatgggtatatattttttaaatcctgttatttcagtgatacatgtttatgtatgaaatgataaaatatctgggtttgcatcaaaacagtacaaaggtgggaagagggcatggaaggaataaatgatacaatttagctacaagttacaattgttgaagctgagtgttggggacctagcagctcgttatacctttcttgtctatatttatatattttttgactttttttaaaataaaaatgtacagagaaagaatgggaagacatgaaataaagatagtaactttgggtaatgggaaattaaaacatgaaaatgcattgagttagcacactctagatatttataatatctccttatgtaacacaaactataaaaatattttttaagataaaaatccttacactatcaaatttcctaacctcaaagattggttccaaaaaaattagaaacaacttggttaaaagtttattagaaccctttttgtggacaatactaaagaatactattagtatggcttcaaaatatcccagataacattggagtagttatttataaaataaacatggatgagaaagctggaccatgtaatgactattcttctagactctcccactttttaaaaatacataattagcattttctcatatataacacactaatatgctggaattacctgttcttctccttccttgtcacaagtgcctatggtagggtataaaatgattactggcctgtgcattcaccttcttggctttgctctgctgctggttttatttctgtgagtgaaattagaaaatacagcaaccactgcctaattgttactagatattattactatgaaaaccagttttataccttatataatgctattaagaaaataaacttcaatgagttaaaaagatctgaatacggaaaactagcaggacacaaaatatttatctcagtatgggggaacacaataaggattgaaacaaaaagtgacattcaaaattatatttaattatataatcaagggaagaaatcagtgcagtattagataaatcattcccacctctttcctactaatccttgccacagctcttatgtttctcattgagagcactgagatgggcagttctactgattaagaactttattaatgagctcagaaatttcttaaataattggaacaagacagcacttcatttatattcattccaagaccacactgtactctagattgagaaatcaccccatattctgtttttcatctcaaatatgcttatctgccttgtctagccaagctcttagaaatatgcacctaatttgtgtgaagcatcagcctagccatggtcacacagtgccagaaatattgaatatgtgtcatattmagcattccagagggtcaagaggaggcataagactaatagcatctgcctcacgtccataagatgaagaaaaacaaattactacagctgcttattataggataattgccagtttctttattcaataccatgctcaaccgaaagtaaaattttcataccccaaatgtaggattatttggagggaaaggaatggccagataaaatggaagagataaaagacttctctgtttgagctttgtcagggtcttagttagtccatgccaattgtccagtctccagtatcaacttcaaactcgtatcaggtaacctaattgtcctgccatgtgttcctccctaaatcttccagaaccccaaactttcttagtttcctgctgctactgtgagttattcccaaacctgtgtcctagagggcccagtgagagacatgattctgttctacatacctcatgaatcctacctatcatcagcttttaattttttggccttagttcacccacagtactctgtggctgcttaaaaatcccttttcttcacttattctcctgctactgcacaacttaactttctccgggcaaacatgccagtctcttaatccaagttcagatgcaagataaagagagaaaacaagatagagtggcacccgcaagaaccttccatattcagacactgctgtattaaggtgtgcctgaccacatcctagaaatgaattccagcaccagatcctaaaaaccagaggaactgtgaaaatacaaaagctttgccctccccacatggagtactgtccacaaaaatgaggtctggaagtccccagatactgtgccaggagatatcatatctggccccctcacgtgggatgttgctatatagatctcagctagttgtgcaatttgaagacccccattctctctacatgggatgtagccctatagtgggccttagtggcaacccacgagtttttatgttattttcattattaatcagttgagaatattttctaattttcattgtgaattctttgacctgtaatgtttagaggcatattgcttaatttagaaagagttagagatttttctagtcacccttttgttactgatttccagcataatatttactgtcatcaaagaacataatctgaataatttcaatcctttaaaaatctgaragttgagttgcttttttgaattggtcaattttggaaatgtttcacatgtactcaaaaagaattttattctgaaggcattgggtattagtgttctgtatctgtcccttaagtagatttgttaattgcattgttcaagtattgcatcttaccgttttttttctggttgttatttcacctaccatcatggtggatttgtctgttttgccattcagtgctatcacatttttatattctgagtcttagttattgaatgctcacagatttagaattgtcatatcttttcagcaaattgaattttttatcattatgaaatctccctttttatctgcaataatctgtttcacattaaattctactatgtctgataaagttcagctctcacaaatttcagccctacaaacacagcagcctcttctagtgcaaagtgacttgctctccacatatacgtataggaattgcagtttgaggtcccagacaaacctgacctgcaaatgaatcccattatctaattaaatgactctcaatgctagttacacattagaatcacctgggaaagggggagccttttaaaaacaactgatgtcagagatctgtcccaagaaactctacttattattagtctgcaacaaaccttgttattgctgtttaataaaagcaaccagatgattctgctgactttataaccactggttcagtatgatatcctgccacccccaccaaggatgttgctcagtaagtgtagatttgtaatttctgggtggagtctgcactctgtggagtatacagtcaaaagccctgccagatgaaaaatgaaagatggaagaaaccctataccctagatgcctggttctcccctgtcccactgtatatcttctccatgtatgatgtgacttatttaacactgtggaaatctaccccagcacattcacagccttttctttcctccctaacctgtcaagctatagccacaaagaatattgtctgataagtatagcaactgtggccatctcatctggattctcattccctttaagagtcagtaatgaaagagaaataaaaggaaagaagaaagaaaccagctccccagcccctgttaaattcagaaactcggcttattatctctggactgctaagatccctaaacttctgcttttatgctacccatactacttcatattaattgtctaatactatctcccccactgaactctaagcactccaaaaactggaacagtgcctggtacctacttagtaggtgctcagtgaaatgtttgataaatgaatgaccgaataactgagcaaagaaatgtttccatagcagtagaaaagatgcagtcgtggtttcactgccaggggccagtatttaacatggataattgaaaacacagcagagcatcagaggagcataactcataatcttatgtgaaaactcaacagttgctctttttcttaaacacagcctgcttcttttcaaggcatctaaacatttgctatctccttgcactccatttctactcttcttcttagacctcccacacagcagcaacctgattgttgcaaagtgctctgttctgcctgctttgtctttaccattttccagctcagtagcagcctggttgttagggacttccttacaataacagaactctttccagctctacagcatagtttaagggagattagttgcatgtacagtccttcgttactcattttctgatttccacaatgttttgaaagaactgaaagttaagactgcttatccacaaggctttttcagtaatgttatgtttatcttagaattctggcctaaatggtaattgaattgtgcatgtaggagaatgcagccaagatgtttcaataatcatatggtaccagggactgtgctgcctgcacatgactcaggcagatgaatctggtgcttgctttcttaaggactggggttcaaagagaagtaagaacaggatgaagaccagctcacaccagctcacttgacaccttttgaaatacaggagcactgtttctcttcaacattagttactatcaaggattcccatctgttagctctaagagaggataggatgtgaaatatgaacagccgtttgaatctctgtggagccactgcagagaatcacagagaagataagtagggttagcagtactaagacccatttatgtgagttattttggagattgctaagatcccagtccagcattatttattccacctactgaccgagacctttatccttttgacttaagacagtattattcaaaaaattgtccatgggccacctgctttagaatcatctacaggtgcttatttaaaaatacctatccctgagccccagatcaataaagcagaatctctgggagtgaggccttgaacttgtcctggccaaaccactcagcccattcttttgaaccctaaagtttagattgctgccttgagatattactaagtattaagcttcaaatagccccaagaagcaatagcactgtgagcagattagtcatttttattgaaggatctaagatcaggttttagtagagacagtaattgaaaagaacttgaagacacaaatactcaatgaggaggaataggacactatcaaagagaaggaacagagataaaataggcaaagggccaaagaaaaacttctttacttcataattttgccctaggttttatggtcatttggcatagtttagttcaatccagcaaacatatattgagcccctaccatctgccagctaccaagaagaaaacaaaatagaaggaagctcttaaatggataatttaaataaatgaggtaaggccaaagattgagattcatacaagaaacttcgggagctgagaagcagggaccctaatggcaacttagcttctagagaaggaagtgcctgagcaggaaaatgaatagaagttaggcaggtttgaggttatgtgtgggggttactattgaggaggcgctaaagaggggacaggaattggtgggaaatggagcatgtgcccaacattggacaatctgcccaagaaaaggtctgagcataaagcagtatgctatattgggattgatacgcagttgagggatgctttatcataaagtgcaaagaataaggaaaggcaatcgatgatcctggataggtagattttagctaagtcgtctgtgtatatgtcttgataacttttacaaagtcctcttgtgctagacatctagaagtcttcctggatctgtccttcaaattcattccaggtttgtggactcaaaatgttagttgtgattgctccaaaaacatgttacaactggtttatgggctctctgtgggacattgaagtggaccataatatcaaaattttttcaatgtacatttgagcttgttttgactattactggaagaatacctaaaaatagtaacattaatgacctctggagagggaggactgggaacagaagtggaatgagtttacttctcattgtataccctttactactgaatttgaattgtttaccatgtatatttatcacatattcaaaaaaatcataaaagagaactgaagagacatttattccataagataaagaaattgtcagcgtcagcatataaaagagtgatttaatttatattaataaccaagttgacaacttattatacagtggtggcagcaatcataacattaaattaattttgtctttcaaattctgagaaaaaacatgaggttggagatgtcttctgtatatcctctaaaaattttgcctctttttttttccagtttgcagctcaccttgtgaagatgaaatatccaagaatctgtattctagatggtggcattaataaaataaagccaacaggcctcctcaccatcccatctcctcaaatatgaagaaccaagagtgtgactgccaaaacttagtgtggcatcagcaccaacagcacagttcttcatatccacgccactctcagacaaaactagatgtccagattgttgcatttccgtaaagtttgtcacgagacattttttaaaatctcataacccacatgttcagttatccatgcaagaaacttgactctacatgtattgctgaaagaattttcttaacagtgaaatctgatcatatatttttaccacactgccacataaagcccaagaaattcagctgacaagacagatttagcattwtcaagaaatcccatttgccctgaaaaagctgtcctccattgtactgaacagacagtcctgtcgattgtgttatttagaaacatacactgaatgtgggctgaaatcatcatctttccataatgaaaactgagaaactattcacaatgcrttccttataaataaatgctacatttagtaactcatttcacccaaacaagggggatgtgtgtgtgtgtgtgtgtataggaagtggagtttatcccattgcagaaagtggtaatacttactcccagaaaaatgaaatttagaaaccatttatatttgatagaatatttggtcagttcctgtagcaaagacgaatggcttaaacaaattttctagtttctttatcacatgaaagtctgtacagtcagtccagggctagtctactggtttcctgatcattaagaactcattaccttctctcattgctttacaaacctcaatatgtggcatccatctcatggatgaaaatggctcctcagcttctaccatcacatctgctatctagaaggaagagaatgagggaaggagggaggggatgaagagaaaagaaggaacaaaagaaggagggaggaaagaagaaaagaaaggaaaagaagcgaagcacactccttccctttaaggtcataaaccagaagttgcgcacactacctctgcttacatatcattggccagaacttgggtgcatggccacacctagctttaaggaaaactggaaatagagtctttgggtggttgatcatttccccagctaaaaacattcttattactgtgtgggaagaagagagtacatattgaggtacagctaacaacctctgcctctgccacattgtttttaaaatgagtattatatttcattaaatctaagacatctcacaattttaggtaccacaaagaaaaaatgaagccaaatgaattgtgacactttgtcaattaaaagacacattccctgggaggccgaggtcaggagtttgagaccagcctggccaacatggggaaactttgtctctactaaaaatataaaaattagctggtcatagtggcacacgtctgcggtcccagctactcaggaggctgaggcaggagaatcacttgaacctgagaggcagaggttgcaatgagccatgatagggccactgtaccccagcctgggcaacagggctcaccctgccatctcaaaaaaaaaaaaaaagaaagatacattcccatttcagaaatctgaaaaaaaaaatgcctcatatatatgaaatatagcatatcctttaattatcttcaattttgttttaactaaaaagtgttcattcatctataacttacattccactccaatgttaagactgcctaggcagaacatttcaataagagcctcaattcagctttctgggccatggttttgttgttgctgctattgtttactttattttattttttctttgcatctactttttaaattgagatatacttaaccataaaattcatccttttaacatgtacagttcagtagtttttagtgtattcacaaagttgtgcaatcagtattatccagaatactttcattgtatgcaattgtctacctgatcagcaggtattccacattaacccctcctaaggtctttgataaatttttgtatatggagtgaggggtccaggttcattcttgcatatgagtatccagttgtcccaggacccctcctgttttgtttgttttattcaatttatttggtcattcaccaaatatgttttgaatacctactatgtatttctaagacactaatataatccatagttatatcatttgtgatccttacctagtttacaaggaaaaaaatgtgagaattaatgagaacaaatatataccaagatttcactaacattgtttttgggccattgtctaccctcttcagagaaatattaaatcctcctgtcctggcaattactattttcttccttcagtctttgatgacttacctgagttcataatcagaatgcaccattgatgatcattctgagtcttaactctgccttactgagaaagcagagaagagagggatggaggggcagtgatttgagttgaataaggtggtaggtagtaggagaggatgaagaccttgtgaagagagctatgtaagaagataatagtagcaaccctctgtcatgattttgcatttgatctttcttaaaacgacacatttaggcttattccaagaaattgaagttttttaaacatgaaaattataatatttaatattctcaacagtaaagtaagagcacactatcactgccatgtttatacacagggcatgttatttcatggtggatgatacgaacagttgacctcaacaactatttgttagattaaacgtatataacccaggatttatttgagttcctttttaatgtattattgattcctacacgatgactatcagcactgtttctggctttacctggaatgccataagtaccaccaccagcccacacagatatacatacacacacacacacacacacactcacattcataaacacacttattaactcttgataatctagcaacaacagtgtacctcctccagtcttctctggcttccccatgctgcactaagagccccaaatctactaaagcattccattcataatttactaataatagatttattacatcattttgcaatcgtttgtttacatttagtcccctattaaaatatgagctgcttaagatcaggagctataatttatacctcttgctaccttcagcaacccaccacattggatatgctcaattaatataaaattgaatctatcaattttagaatctatttgaagggagaaaaataaaaataacctgtggtaatttttttcaactgccaaacttatctggtacctgatagtatagaaataaattgaaatctcaattcatggagtgaaaaaaggatctctaaagtcccatccagctctaaaatctgataattctagaagttggagcagataacttccaaaataaggtaatttaatctagttgcatcctcttttcaaaatacagaaatgttagattcaaaaagcatattaaaaataactaatgcttaaccaagtttgaaagaaagaagttttttgatgtcagaaatgaaaaggacctgaaaggcacagcttttaggcccgtgggatacccagtatcaatataagccccaagaactcaggttttggaatacatataggaatagaagacatagctttggatcttatgggtgggagttctaattaagacctctttatgaagtgaccgtctcaaggaactccgctccatgaaatgacaagacataacttcccgccaaattagggaagctacagaggagattgtcattggcctggttattcttgatgaaggaagaaaaatctgttacagacagagttgttcagtggaaagtctggggtaagttcctgatttagaacaggctttagtgcactttaaaaggaaaacaatgaattatataaaacttttagaggacacagtggtgccagatttttgttggattcctgtgctttcctcctccaaatagttaccaaaaaatattcctttgggaattagtatcaaaaggattctatagcatctcaaaagaatcttattcactttgggaggccgaggcaggcagatcacaaggtcaggagatcgagaccatcctggctaacacggtgaaaccccatctctactaaaaatacaaaaaattagccaggcgtggtggtgggcgcctgtagtcccagctactcgggaggctgaggcaggagaatggcgtgaacccaggaggcagagcttgcagtgagccgagatcgctccactgcactccagcctgggagacagagtgagactccgtctcaaaaaagaaaaaaaaaaatcttatgcagtagtcttatttaataaaatccactacaaggagagaagactgctgccttgactatatagaaagggttggcagatatttcattctatcagttgtaactagtaatcccattgttatacatgctgacccaaaatatagctgttattaaccaaataatgcatttttcttgataaatgttgattaaatcagattggaagcaaaatggtaatatttatgatcaattttagtttggatgttcaatgtcaagaccaaaccctcttcacagctaccaacttcaattttatgtggaaaactaatggtgaagagtttcaaactttaactgacacttgacatttaacagggtatgtaattgctcacacacaacctttaggttttgtaatccagttttatctcatacaatattagaaacagtacacattgtaaatacctattttaaaagttagccatattttataaagtcacatgtatttatatcttttctgagtaattttcctgttaatgccttatgataggtgcttgtaacatgaaaactaaacttggatcttggcatattcagtgttctatagatagattgtgatctgtatagcttctacggtgactttcaggcctaatgtctccttttaagttgttattctttaatatcctttctcattcctttcagaggacctattattagtttgcattgtctgcagcatttcaataatactgttctattctaataatactgatctgttctaataaacagttctaaatactgttctgttctaattggtaccaaagcactacattgccaacatttctagatattaatcccctgggtggtgggggttaaaacactgttctgtcttggcctatgactaatcttggagctataacaaatgcatttaaagcattagatcagattctaaatattgcttcctgccacgctaaaagattcaacttttactctcattatatatagatgtgacttaagaaacagtacatggcctaccattttttaaaagactatactagtgtgatcactagcattaaaacctaagataatccttgcaaaggagacttaattttctcattaacctggaaacccattcttattctgttattaattttttctcagttgtattagcatattttcagtcctatagagtagaatgatttattattctaagtcctgtattgctctggaactggctcctcatagcttgaaagagctgaatgttctcatctcttctcaactccgtggtcagtgatctcaggttagtagcttataatcagccacatcaggggtatttgcaccatagaaataggcaagtattccaaatcaggctctttttaaaactttttatttatttttgagagccagtcaataacatttactagtgcatcattgattcaatcatcctagggtcattatattttctgtagattgtgaaagtaaaaggaatgttaaagattattcaatccaaatgtcattgttcaaaacaataagaaaagtgaaaagattttgcaaagatcacatagctagtaaaaggcagattcaaaattgcaattctgcttttctgattctttgcctatttttctgctcatcatatacagataaagaaagtaaagggcaccagtttcaattcattacatatttattgcagaccaactttgagtcagtcgctgtattatataatgtgtggggtacaaaaatgaagcagtgaaagtgtcgattaaactgactactgactctattacttggaaatgccacttaatatcagcccttagaggatggcactctcacctcctcatcctccacactttcaaaaaaagactgcatttgagcattctactctgagggaagaatcactattttcaggaacttttgctatgttttaagttacctttcaccttcaaggcaaccttcctcagaaaaacatctctggtagagaaacacattgtctctgtctacagtacaatccttgatatacaggatcaaagttggcttttaacctttgttttctatgtcttagccagggaccaggcttgaagaataagaaaagtcctcctatcagtttcccagtcatgtgtggaaagtcaaggtgggggagtgggggatagctagtttctgaatctattaatcacagaagaaatagaggtcatttaagtcacttgctaactttaaaatatagttttatgctttgaggtaaactatcctgataatttattatttgccagatagcgtatattttctaaaattatctttaagatcattaataattccatataccatgcgttcatagccacagactccatataaggtcattaaggatttgaaaggcatgtgagaaatagagctattggattgaggccagatggcagagacggtagtttgcaaagtgatgtgcaaccaagaagggaatcatattattgttgaataagcaggatttacataaatgaggatttttttaaatctctggacatattatattgtcattaattacatgtggcagtataagatgacaggataaaacatctgtctaaatgtaatgcctagtgtgaccattttaactccctactctgagcttgtttcctaattttcaaagatctcgggatctgctcccatcccacactgtcctagtatgactgtgctctggagaggccttcctgagatgccttctgatgaagacctaccctgagcaactggcat

SEQ ID NO: 97636 - DNA, 21254 bp, Homo sapiens
cccctagcaaccaccaatttgttttctgtctcttttggccaatatgatattcttttccttttccttttttttttgagaagggtctcactttgtcacccaggctggagtgcagtggcaccatctcagctcactgcagccttgacctcctgggctcaagtgtttctcccacctcagccccccaagtaactgggactactggtgtgcaccaccacgcccagctaatttttatatttgtattttttgaagagatggggtttcaccatgttgctcaggctggtctcgaactcctgagctcaagtgatccacccacctcagcctcccaaagtgctggaattacaggtgggagccaccatgcctggcctcttttccttttttcttttcttttcttttttgtttttttttttttttttttttttagatatggtctcactgtgttagcggggttggtcttaagctcctggccttgccgggcgcagtggctcacgcctgtaatcccaccactttgggaggctgaggcgggcagatcacgaggtcaggagttcgagaccagggtgaccaacatggtaaaaccccacctctactaaaaatacaaaagttagccaggcgtggtggtgtgctcctgtaatcccagctactcagggggctgaggcagaggaatagcttgatccctggaatcagaggttttagtgagccgagatcgcaccactgcactccagcctgggcgacagagctagactccgtctcacaaaaacaaaaacaaacaaaccaaaaaaaccaaaacaaaacaaaaaaactcctggcctcaagcaatcctccacctcagcctcccaaagtgctaagattacaggcatgagccaccgagcccagccaaccaatataatatatctttttaaattattattattattttttgagatggagtttcgcttatgttgcccaagctggagtgcaatggtgtggtctcggctcactgaaatctccgcctctcaagttcaagcgattctcttgcctcagcctccctagtagctgggattacaggcgcccgccaccacgcccagctaatttctttgtatttttagtagagacagggtttcaacatgttggccaggctggtctcaaactcctgacctcaggtgatccgtctgtcagcctcccaaagtgttgggattataggcatgagccactgcgcccggcctatttacaaaatttttttttttaaataatgttttaattttgtagagatggtgtctatgttgcccaggctggtcttgaactcctgggcccaagtgatcctctcttgcccttgcctcccaaagtgctaggattataggtgtgagccactgtgcctgcccaaccaatagaatattcttattatatatgatgcactctggtatttgccgttctgtgctattctgtttgaatttaaaaattggtcaagacccaccaaactgatttccccaccaaggcagtgacacacattagaatgacctggagaattttaaaagatactgatgcccaggcctcaccctagagattctgaagtggtttcaggactttttcttaattaaaagataaatagagatgaggtctcactatgttgcccaggctggtctcaaactcctggcctcaaacgatttctcccaccttggcctcccaaagtgctgggattaaagacgtgtgccaggctgggcatggtggctcacgcctgtgatcccagcactttggggggctgaggcaggcggatcacaaggtcaggagatgaagaccatcctggcttgatctgtagatcaagtgaaaccccgtctctactaaaaatacaaaaaaaaaaaaaaaaaaaaaattagccaggcgtggtggcaagtgcctgtagttccagctactcaggaggctgaggcaggagaatggcgtgaacgcaggaggcggagcttgcagtgagcctagatcgcgccactgcacttcagcccaggcaatagagcgaggctccatctccaaaaaaaaaaaaaaaaaaaaaagatgtgagccagccagttgcaggatttctggaagctcccaggtaatgctatatacaaccaaagtgagaaccactaacctaacgttgtctccccagcttggggaacagtgaaatgagacttagagccagggtgatccaggaacatagagggacacagaaagatacaaaggcaggttcattttatttatttatttatttatttatttatttatttatttaaattttttgagatggagtgtccctctgttgcccgggctggagtgcagtggtgtgatcttggctcactgcaacctccgcctcctgggttcaagtgattctcctgcctcagcctcccaagtagctgggactacaggcacctaccaccacgcctggctaatttttgtatttttagtagagacggggtttcaccattggccagggcggtctgaactcctgaccttgtgatctgcctgtctcggcctcccaaagtgctgggattacaggcgtgagccaccgtgcctggccgatttatttatttatttatttatttattttgagatggagtttcgctcttgttgcccaggttggagtgcaatagtgcaatgtcagctcaccgtaacttctgcctcctgggtttacaagattctcctgcctcagcctactgagtagctgggattacaggcatgtgccaccacacctggctaattttgtatttttagtggagatgaggtttctccatgttggtcaggctggtctggaactcccgacttcaggtgatctgcccgcctcggcctcccaaagtgctgggattacaggcatgagccaccgcgcccggcctatttatttttttgagacagtctcactctgttgcctaggctggagtgcagtggcacaatcttggctcactgcaatctccacctctcaggctcaagcgatgttcccacctcagccccccaggtagctgggactactggtgcatgccactacacctggctaatgtttgtatgtttttgtagagacggggtttcgtggtgttgcctaagctggtctcaaactcctgggctcaagcattcctcctgccttggcttcccacagtgctgggattacaggcgtgagccactgcgtccatccagattcatgatatttagatgttgaaatgtggctttacagactcagacagctctctgaggcaaacaaagagggagatgcaggtaccctcagcacaagccccaaattacctgcaggggagaggcggaaaatcagacaatgtagaaaccgggagaagaaaggtatggacagaccgatgcagataggaggggaaggaaatacctggaaatgagatagagaccggctggacagaccccggggaccctgcaggtcaccacacccttctctttcagctcacctgttctccaggaccagccctgctggggcccaggcccaggctctgagaggccgtgtcctaacctgccctggccccggagaagctacgttgccacctgtcccccttccctggcctggtggggcctggctttggggcaagactgagccacgggggaagggggaatcccgtacctgctgctgcttcctctgtcttggctaacgtctgtccccctgaacccctaaccatatcccaagagctcccaaagcctgagaccagggtcatttgtccccaactccccatctggccctgctgttgctagtacctgttatttattacctggaggcctgtccagcacccaccctacccccataaagcattgtttacacctgtgtcttggcctccattattgtgagatggcagggagatggaagaggtccctgatggaagaatcatgtgtcatggtgtttgggggccttgtttctgttttttttttgttgttgttgagatggagtttccttcttgttgcccaggctggagtgcagtggcgtgatcttggctcaccacaacctccacctcccgggttcaagctattctcctgcctcagcctcccgagtagctgggattacaggcatgtgccaccacacttggctaattttgtatttttagtagagatggagtttctccatgttggtcaaggttggtctcgaactcccaacctcaggtgattcgcccgcgctggcctcccaaagtgctggaattacaggtgtgagccactgggcctggccttgggggccttgtttcctgattggacgtggtgtggggtataccaagcatgatgactcaggtgcctgttgcggagggagggaatttgttactgtgtggacagtttgtgacaatctgtgttctaagctcacgtgtgtaaacacgctgatgtccctgtgtttgtgacatgtgtacatgtttccagtacctgcatatgggatgatgtctataggatataatgtgtgctggttgtgtgtgatgctgacagccgtaactgctctgtggccttggtcattgtattggtgaggctggtattgtttgggacatcaaggccaggggatgggaatttggacctataggtgggcctccggtgtgtgcatgtctgatgcctgagagtcagaggcagtgactcactactgcgtgtgtgcctgtgcatgtgtaccccgaggtctgtgtgtgttttggtgtgaatttggctccttttaaacacccatgtgtggccaggcgtggtggctcatgcctgtaatcccagcacttcgggaggccaaggcagatggatcacttgagcccaggagttggagactatagcctgggcaacacagagagaccctatctacaaaaataaaaaacagaaaaagttagccaggtgtcgtggtacacacctgaagtcccagctattccggaggctgaggtgtgaggatcactttagttgggaggttgggcctgcagtgaactatgatcatgccacagcacttcagcctgggcaaaagggtaagaccccatctcaaaaacaaaactaaactagaaacacccttgtgtggccatgaaccctgtgtgtgccctgaggactgcgggcttttgtgcaatcctcacgcatgtgtggataccagtatgcatgcccttgtgctcacgcgaaccgccctacgccctcaggtggcctgcaggggactggtgcagccccgaggacactcccagttgctcgtcgccctcccatctccacgtcggccttcaccgacccggcgggagccttgagtcccagctctccagagcaatggtggagcgggcagggcattcaaaatgaccttatctccttagtctcctaaagtgttcccagctggccatgcaaatgtcttctctgtgtagcgttccgtggatttttttttgtttcattttttaattttgtgtaaagataaggtctcactccgttgcccagactttccctggttctttattctgattcccacaatcgtcccgagggggcaggccggagcgggtcttgaaaatacacatttgcacatcccttctagtccgcgttcccttttctcaagggcaacccgcacttttttgcctccgttataaaagatacttatgtaaattactgacgtgcgaatttacatacatttctcaactaactgcgtagccatttctccgtctctcacctccgttcctggacggcgagaaggaggaggagctgaccatgtaaatgaagtcacgcgcaccgcgctgccgaactcggtgccccgcgctgggcggggggcgggtaggcctgtccatgtaaatcacatcatttgcgtgccccgccccgccgacgccacttgattccaacatgcaagaaacgccccctcccagacccggcccctcacactgcgttccccctcccgcgcaaagggggcggggcggaggatgcaaatgaacctcgtgtaggccacggaccgctgtttcctttctccttggtaggggggttgtcccgaacttcctcgccccgctccgccccgccccgcgcggctcgggcctgcgcaggcgccgtcccctccgcggggcgcggtcacgtgcccaccgggcgaggcggggcggggcgtcgcgcgcggtgggggcggggtatggcgcgctgtgcggcgcagggcggctggcacaaacggcggcgccggggccggaggaaaaagctcggtgaggaggtcgcggggcgagaagggagcgggaggagactaagccggagccggggcgccggcgcgaaccgggcggggtgtgggggcgcgcgccggggcctgccggggcgaccccgggaagggggatgtgggtgcggcgcgggggaggggacgcgcgccggttacgttgggtgccggccgttgtgggggttggggtgggggcggggagcgcgcgccgggcggaggccgagtggagggggaggggagggggtccgagcggcccttaggccctgcccctgtcgcctactgcgctcagaaggggcctcagggcctgccccgggttgggggcgttggggtgccctggatgggggcacctttatctctcgtcctgtctccgggtgcgtgcaccctcctccgtcctttcctctgtcgccgcggaccctctccccgagggcccctcccgtcggtcagtctcgggacctcccttccgtctgggcgtgtgtccgcccccggccggcttcctcccgtcgggctcgggtcgaccccaccgtcccgctccgccccgggtcctccctcccagcttccctccggtctatttttctgtctctgggcccctcgttctctttgtttttggactccccagtttcctctgtcttttgacccccccgcccccaccctgactctccctggaacccccacgtttctcgttgtctttctggaacgccgaggcaggtccctcctattttccaaaccccctcctttcccactcctccacaccacccttttctactccagccctccttcttctgtctttggttaccgcgtcccacaacctgcaccacagtcctctgtcttagggtcatctacccagcccctggcctccagcctctccctatcactgcctcttatctgtcagcggactcccgcacctccagattctcagggtcctctccccgacttggcctcaggttttggggggcctctatagtcaagtctgtcctggtcgtcttccccactcctgcccataccatcccggctttcccctgcctgcctgtctctagtttctctcacatccctttttttttttcytttctctagccaccctgaagggtcccttcccaagcccttagggaccgcagaggacttggggaccagcaagcaacccccagggcacgagaagagctcttgctgtctgccctgcctcaccctgccccacrccaggcccggtggcccccagctgyatcaagtggaggcggaggaggaggcggaggagggtggcaccatgggcccgggcggtgccctccatgcccgggggatgaagacactgctgccatggacagcccgtgccagccgcagcccctaagtcaggctctccctcagttaccagggtcttcgtcagagcccttggagcctgagcctggccgggccaggatgggagtggagagttacctgccctgtcccctgctcccctcctaccactgtccaggagtgcctagtgaggcctcggcagggagtgggacccccagagccacagccacctctaccactgccagccctcttcgggacggttttggcgggcaggatggtggtgagctgcggccgctgcagagtgaaggcgctgcagcgctggtcaccaaggggtgccagcgattggcagcccagggygcacggcctgaggcccccaaacggaaatgggccgaggatggtggggatgccccttcacccagcaaacggccctgggccaggcaagagaaccaggaggcagagcgggagggtggcatgagctgcagctgcagcagtggcagtggtgaggccagtgctgggctgatggaggaggcgctgccctctgcgcccgagcgcctggccctggactatatcgtgccctgcatgcggtactacggcatctgcgtcaaggacagcttcctgggggcagcactgggcggtcgcgtgctggccgaggtggaggccctcaaacggggtgggcgcctgcgagacgggcagctagtgagccagagggcgatcccrccgcgcagcatccgtggggaccagattgcctgggtggaaggccatgaaccaggctgtcgaagcattggtgccctcatggcccatgtggacgccgtcatccgccactgcgcagggcggctgggcagctatgtcatcaaygggcgcaccaaggtaaggctaggtgggggcctctttggaggggctttgcagcaccctggtttgcagcattcagtgctctgagcacagtgggtttggagacaggcttctgggaggtcacagaaggtttaggcagttcagtggagtgggtatgcttacttgtggggacttgggggggtctttatcctccctacgggccttaatgtgtgcacctgataagctaggagtttgtcctggagccacagtggttcttttttttttttttttttttttcttttctttttttattgatcattcttgggtgtttctcgcagagggggatttggcagggtcacaggacaatagtggagggaaggtcagcagataaacaagtgaacagaggtctctggttttcctaggcagaggaccctgcggccttctgcgtgtttgtgtccctgggtacttgagattagggagtggtgatgactcttaaygagcatgctgccttcaagcatcgccacagtggttcttgactttgccaggaaccctcttaaactcatgagagctgctgacattcacagcgtggaccttggtggggttcatggcctcctggtgtcagtctgtggccccagaccaagcacggggatgtagataggcacacagttcacctggccgttctctgttgctgtctgtccctgtccacatccttccctgtgctcctgtcgtccatccctgtttgctggcccatgtttctagtccatccatcctgtctccaaggcaggagaagcagaagggggagggtggctgtgatgagtgagccctggsstgagggaaggaaaggggtgctgcccgctgggccgagtgcttggccctggactgcattgtgccctgggtccccactgtggcatctgcatcgaggacagtctcctgggggtggtactgggtggctgcctgttggcccaggtggagctcatccccatgtctcccacccttcactgtcccagtccctgccctccattccccctgtcctgtgtgtcacttcctccctacccatgtctgtctcttcctctgcctttatgtgtttgttcttagtccctttttctttttgctttagaacaatagttcttaatggtattttggagcctgggtctttttgagaatctgtcagaggccacagatcctctcttaagacaaatgctcatttgcttggagtttccgggcagttgtcaaggcctcatggcctccagctgcctgttcaggaacctggggtcaggagcccagcacaggacagtggtccatagggcctttccgggctgctgacaggatcattgtcttcatgggtggtgtgggggcctggccttgagtccaaggcttggtgtcctttggacaaggccctgtggggagtgcccactgctcaacacagtgatgcctggctggctgatggcaygggcagtgttgtgccctgcaggcgtgaggctgagctcctgatgtcctctgcctcctcctgcagatcccatcttgggttctgcttctgtgtggctttcctctcaggctggagctggctcagggaccagggctcccccggggccaaggcctgtttcctccccaccccagctggaacttgttctacttccctctccctcccgttacttgatagctgagccagagccggcccctccctgggcttggctcctgtgcgggcgggatcagtggcctccctggctcagcatcttcaccccaggttggctgtcgtcctcgtcagggggagaccagaagggctgagtggcccagatgggacactgctctgagcctcaatttgctgatccacggaatacgaaaaccaggttacatccccagtgagtctggcagtttggggaggggagagtaggagaagatctcttgtgttttggtgcctctggtgcccacyttctatgtggttggggacagggccccagcgaggattggggaaggggcgtgtttggacttttttagccctaggtgaccttgattgtcctagggaagtaaggacaggccaggctggactgagaacataggggaggagccctcccctccccagtgagacagcaactccaggctttcccgcttttagatgggccccatctggactctctcctgtactccagagtaaggctgtggggtgctcaggtgggctgcagcagttgccgtggggacatggatcaccagtgtggctagagccagtagaaacgtgcttcttagtcgttctgagtggagctcctgtgtcatccttccttcccccaactccctggttggggacaggtgctccgttgacctgtaggtgggagagagttgactcccactggcagcaagggctaccagaggggaccccagggagagtccagcttgcttggtttgctccttgaagagcagcttggaggtgggacagtcacaggcttctgactggggtgtgtgtgtagtgggggtggggctcttggcaggcagattgtcaccaatagcctttaagtctttggtctcctggccctggtcccacctgtccctcccctaggtgggaggggtggagagcaagtttcctgaggccttcccctgtgagggcaggaagtagatactttccttggggccagaggatgctttcacccccaaggtgtgtatatgtgggggaagggtggggccctaaagagcaggttcctgtttctgtgtgagtcccatgtgcttggtgggaggcgctgtgtgagaatgtacagggcaggaggaaacatagcagggctggggtgcagaggaggcccagagcagtgcactccagtctgcaggtactgcactgggcactggggagaccaacctggccccaggggcttccctgtggctgccttccagggcagtactaggtaaacaggtgcctgtgctgatgccatgttgctaggagtggaacggacaatcagccggagtactcaaggtgacccttggtctctgaatcctgaataacaaagagggtcagaaggaagagtgtcccaggccagtgctgaggccttgtggtggcgatgagctcagcctgttgaggcatggagcagagtgatgggagaggcacatgaggttgggggcctttgaggctgtggttgggaatttgtattttctcaggatggagtgaagacctggagaggaggggctctggctgctgtgtggggatgaattgtgggaagagggtgcagcactggaccccttccctgccacccatccacgtgcatcatcagtgtaatctctgattggattcctaattggggaggtcttgcccrtctctagtcagtaactcactgtttctaagcctcctggrccatggcccaattcttctcccagtgaggtggttgctcagagtgccgacccttccatagggagtgagcagtgcaaagaaggtgccccctcctgaaccttgaagtgtagccattagggttttccctggggggccttctcactaattgtactctggtgctgccagagagaaggttgtcagcttcccactgctaggtggcagtagatggtggcagccctctctttccagggcaaggtctggtggatgaggtgcacatggttaatgcagagcagcttaacatccaccacagagggtgagccctgggataatgtgttgggaggcgtcctggggagggtgaggattgaagcagcccagtctgctgtggcgtgcgtgcttggcaagcatcctgttgtggcagtggccactgatgtttgatcgtgaatgtttatcttgggactgtcttgctgggccgggcccataggtgtagctgagcattcgtggggaatggacgccagcagagttgtaccagggcagagaggtcagggcagagaggtcaagacagatggtccgggctggggagaagttgaagggtccttgtgccagtcctcccctttttgtgtgctacctcatcttgccactgcagtgactttgggcagagggtgggacagggaccttttaaaatttttaaatggcatttcagcctgtgctccagttctccatgtggcaggcactgtgctggctgtcttcccagacacttgttatcttgttcacttgttccacaacaacctgtgaaatagctgtgagctccattggatccatggatgaggaacctgagaccaggaagtcacctgcctgatgccacagctcatgtggcagcactgagacttgaaccagggaattgtgtctgcagaagtggctgggccatttcctttacctctcagccacctttctgccagctccctgatgacaaacatcccggggccctggccacagcattgtagggctgggtcaggggagtggcaactgtcaggcagaggaaagaaccctgtagacagagaaaccaagccctgcaatgagtcctgttagatctccaggagttggggctccagaacctcccaagttatgttctcagagagattaattgctaccgctgtaaacagcagtgtttattacccctgctgtacacatcaggcagttgaggcccattcaggtgttggaactggctagggttacccagcaaattatccttggagttggaattaggtctttctattcagactgtagcttttggctcctgttcggaggtctatgggacagataatttagtggggattctttgtagtccagggcagcagttcttaacattgctgcatggtagaattacctgggaagctttaccaatttcaggcccttccttaggccaggtacttcagaacctcagagctccccagggggctccactccacagccaagggtaagaattcctggtctagggctgtgaggccacctccttgcacacctgaaaatgtttaaattggtattattctactgaaatggctgaggtggggtttggggtatcttgaaacaaatcaaactctgttactaattgagccctagctgggtgccaggccccaggtatgtgtgttgggagggagtgggctcttgaggcccaggarctgaggtttctgatagacttggggatgggattttggctgaaaaagaaagtcttttggggcaggagcttggaacccttgacccaaggagtcatggggaagatggggcaaggaggggtgggaaaataggtaattcatggctgcttctctaagatgtgcctgcctagccccagtaaacctacctccctccatccctgccaggccatggtggcgtgttacccaggcaacgggctygggtacgtaaggcacgttgacaatccccacggcgatgggcgctgcatcacctgtatctattacctgaatcagaactgggacgttaaggtaggggtgagggtgagggtgagggtggcgctggggctagggctggggcgggggtggcgtgcgtccactccattttccactctcagcccagattctggcattctcctgtttctcttctcaacacacagcgggcagtgcgatctgccggctcttcctgggaaatggcacctcctcctctctagcggactgtgtggtgggaactcccctctttccgggaatggtgctgtctgcccagccccacccggccttgtaatgaacactttcccccttttcctgtctttagtagcttcctgcccatctccatggtgatgcagtctctgggttgtcattcactttgagagcccgaggggtgggagggagtgatgcaggcagacgctgcgcctcctagtgggctcccggggcaccgtgggaggcagcggctcctggccgtaccagctagcctcatcctttggcctgcccccaggtgcatggcggcctgctgcagatcttccctgagggccggcccgtggtagccaacatcgagccactctttgaccggttgctcattttctggtctgaccggcggaacccccacgaggtgaagccagcctatgccaccaggtatgacctgtacttctggagamgcacccaggtgctccccctgtgacaatgtcctgtcagagcctcagagtgactagggagcgacgaagtattgagagggggcctaggtgggagcagaaccgggtggctcaaaaggatggccgcctagtgtgtgtggatatggtagctggaattgcagaaaactaatgtccaaccaccctggtctccaggtaygccatcactgtctggtattttgatgccaaggagcgggcagcagcyaaagacaagtatcagctaggtacctgcttccctcccttcagtccttcctattctgtgggccctcttgggcctgatgccaccccatccccctcatcagcctcttgttaaatcccaccactcatttttcttcatctctgcccaccttccttagcccactctcctggtaccccaacaggagccccatttcttcctggtcctctccccatctccccaggtttcccttggcttctttgtccttctgatgactcactgtctcctgtcccctctcacccccagcatcaggacagaaaggtgtccaagtacctgtatcacagccgcctacgcccacctagtggccagtcccagagccgcatggcagacagcttaaatgacttcaggagagccctgggcctgtgctggctgctccttccctgccaccgctgctgcttctgactttgcctctgtcctgcctggtgtggagggctctgtctgttgctgaggaccaaggaggagaagagacctttgctgccccatcatgggggctggggttgtcacctggacagggggcagccgtggaggccaccgttaccaactgaagctggrggcctgggtcctaccctgtctggtcatgaccccattaggtatggagagctgggaggaggcattgtcacttcccaccaggatgcaggacttggggttgaggtgagtcatggcctcttgctggcaatggggtgggaggagtacccccaagtcctctcactcctccagcmtggaatgtgaagtgactccccaacccctttggccatggcaggcaccttttggactgggctgccactgcttgggcagagtaaaaggtgccaggaggagcatgggtgtggaagtcctgtcagccaagaaataaaagtttacctcagagctgcacacatctgactccatctgcaatttagggcctttattgaccgaggagggtatggaggtttgagggccagtgagcccaccatagtggagcctgacctcagcaggccactggctggagctggaagtctggggggacactgcccaggccagtgcactgcaggtgaggttgatggtgccagggcgtaccacagggagcaggcagaacctctgtaaggtggccgtaaggaataggaagatacccgagtgggccaggcctgtgcccaggcacatctgctttgccgggtacacaggtgcacagtgagcaccaggtaccccagagccagtccaggctggtccccttcctcctctgcctgcacctgaggcaaagggcatgaaagcatcattgccctggaacttgcccttgtccaggaagttggtagggttgaagcagtctgggtctttgaattgagtggggtcccggtgtgcagtcacaagcaggggaatcacaaaagtgccctggggatacatgcaacttgggttacctgcgggcttggtgagcacctgcaccacctccatccaagacgctttttaaaagcccaagggaataggccgggcaagtagctcacgcctgtaatcccagcactctgggaggctgaggacagatcacttgaggtcagaagttcgagaccagcctggccaacatggcgaaacctgtctctactaaaaatacaaaaattagccaggcgtggtggtgggtgcctgtaataccaggtactcaggaggctgaggcaggacaatcgcttgaacccaggaagtggaggttgcagtgagccaagatcatgccactgcattctagcctgaatgacagagccagactccgtctcaaacaacaacaacaaaaagcctaagggaaggcagagctgccttcctgctccaggggtaactgattgtgttttggtctgcacagcgcacacctgctgattctggctgatctcatgcacccgggtcccgcacgggatccccagactcagtgggtacctttgggcagacagtggctgtgcaggtgggtgtcgagggtgagggtgcgcggcagccccaggggcaccacgctgatgaagcactggatctcgagcagcactgcgttggcgtagggcaggcacacgcgatagtccaggcttggggcgggcctccaccctaccacagggtccagctcctgcaccttggctcaggccgggggaggctgtgagctgcgcacttccaggaccctccagccatccccagactgcagcctcccattctgggtctctccgggttgcacacctgccacctctaggtacttaagcagaatgaggagcccatagcacagggtggtgctcgtggtttcggtgacgccaaaaaaaaaatgcgtcgtcattaccgacgtctactcctggaaatggctctccgggtcctgctgttactgtgggcagaggagatgtgctgccgcgtgccaggcacctgttggtgggcggcatggatagagtttagagagctgggacccatgccttacccatctggtcaagcaatcaatgaaatcgcggggctccgctggctgccgcatctgccagtgtcgttgaatttgctcagagatgacccgcagctccgaaaagtttcggaagattcggtggtgcgggcccgggagccagtccatgagggacaggcaaatgtacatctggagagacagggtctgtctcaacatgggccctgcacaaggccactaggccttagtttccctacagggagattggactaggactttgatactggatgttctagaactcttccaggaatctgtcccattctaatgatccattgtaggtaggtctgtgtactcgggatttggcataaggctggacgcaccaaggaaagattgtggccggccctctcacctcgccccatctggaactaatgatgcagaagttgtcactgaagaggttcaggagcctcaggaactccgggtccccatagcgatagcggttcccgaagacaagaacagataacattggatacagcattatccagtagccgcacggggtcaaacggggctcctgggggtaggaacaggacggtggtcataacgcgtggtcctgcccccagccagccccatgggcttactggctttcttccacccaaataccttccagtggccccgtcttggcagtgcaagggactctcccacaccaggcccttccgctctcccggccaggccgaagcaatggtggcttgaaattcgtctagcagacaagccgcctcctccaggacgcgcgcctcgacggtccgcgtacccaacccgaacttcttaagcgctccaagtgcaaaattgcgcagtgtccaccagcacggccggttagaaaacaagattcctgtggtggggacgggaaaggaggcgggccggggagccggccacgccctatccaggaagcgccgggtcactggctacatccctttaggggcctccgactcctgcggccggcttcgttccctttgcttctttaccagacctccaagtgccctatccacacattggccccgcctttgctgggctccatccctgacctaggctggctctcgggctttgactcttaggctcttttctcctgttggctgcaggatgaacctccattctaaccttacgctttagcgccgccccgccctctctcggccgtttgcacctcattagctggagtctctattaggccccgcccccatttgcccgcctctaccatttacccgcccagcctggagcgtccgggccggcaagtccagcgccggggcctcactgtttccgcgtgtgaagcgttcgaagactgccatggacccgcggccagagaccgcatccgcctgtagcactaacgcgtcccgcagcgctgcgtagccgcacagccccaccgcagggcgcgggcccagccgcactgtgaacacccggccccagcggccggagagctacgggtagccggtgctcagcgggtgcccatagggttcctcatcggagccattgcccccagctccctcttccttcagacccaggagtcctcgtctcagaccctcattcctcaggcccaggaattcaaatccccagctccttcctccctgagatccaggagtccaggcccccacttccttcttcccttaggacctggaagtccagcttcccagcctcctgcaccctcagagtcgtctcctgggccctcagtactcagcctgcccaccctgaaccagaacagaccccctgctcccctcttcccacaacctgatttcctgctctgggctccttcgttacgacccagtgtcccggccccaggctctccactccctattctcctttcctagtactcagcagtccggagcactcatccttcctgtccttcctcaggatcatagagtacaaaccctcagctgtcttcattcaggaggagttctagtccccagccccaccttcacgaatccagaattccgttcccccattcctgtcgggaatggagtgcgcggtccaggcctccggactgcagctgcaagttccccagcaatgggagcggcctgggccggggaggtagggacccccgcatctgagcgcggcacccaccctacccccaccacgccggcgccagcaccagaagccacaacagcagcgcagcgatacccgcgacatgcctgcaattctccacgcctgcaccccttcacctctatttgatttccaaggggtcttaggggtggagcggggcggagacccgatgtgggaggagtgggcgtctccgggctgctcattccgtggattccccaacccgacgtctccaccccgcccccagccctagtggagctgtgccctggctccccctggctttttttgtgtgtctgcctcagcctgtcttacttagcaactttcgtgcaccagcattttcatggcaacacacctggacaacaggtgcaccctcctgagcccctagcacctttgagtccaatttacttggcctgtaagtgtgtattcctcaatctccgggccacctctgggtcccctgaacgctgtaccctgtacctctgattcctaaatacacaccgactctcaaatacaccacttctgttttttttttttcccttcttagagtttcactcttgttgcccaggctggagtgcagcagtgggatctcggctcactgcaacctccacctcccaggttcaagattctcctgtttcagcctcctgagtagctgggattacaggcatgcaccactaggcctggctaatttttgtatttttagtagagacggagtttcaccgtgttggccaggcagatctcaagctactgacctcaggtgatccgcctgcctcggcctcccgaggtgttgagactacaggccactgcgcctggctcaaatacacttctaaagacacccctggcattcctgtgctctgtgcctgtgattcctaggagctcacacctgagcccttgtcacttccattactcttaggaccctgtgtactatgcttgttccccagatctgccttcaatttccctggcttctgggtgtccatcagtctggcacttctgtgcctctccttagttcttcagggtgcctttctgcatgttgatccccttgtacctccatattatgtcctgccctgaatctaccatctctatccccaaggcactggctcccagatgcccccaaatgttctgtgcccatgctgctgaaccccctggtatccagtcccccaagtccctgtctgaggccaggccatgacgacagacaaacttatccctcattctctcatctatcccccccaacccccatcctagggcatgggctagagggggcagactctggcctggatgggccagggctgcggtggtgggagcagtgaggttggggctgtatttggaacagactgttcaggaatgtggtccaccctcctgcctgtccctgcttggccaaatccagccttcctccaagtgcctggcacagggcccagacctggggagatggtgggcggggggtggactgtgcagagcctaggactggcattgtctctgggagggtctctgtgtatctttgtttcatctctcagtcttgcttgctccctccctccctccctctgtccgtccctccctccctccctccctccctccctccctccctccctcccttccttttttcttttttttttttgagacagagcctggcttctgtcccccaggctggagtgcagtggtacgatcatggctcactgcagcctcaacctcctgggatcaaacaagcctcccaccttggcctcccaagtagctgggaccataggtacacaccaccacgtccggccaatttttgtattttttaaggagacaggatgtcactgtgttgcccaggctggtctccaactcctgggctcaagcaatctttctgccttggtctcccaaactgctgggagtatagttgtgaaccagcgcgcccagcctccctcactctcagtctctgtgtttctgtgttcatctctctctctcctctttctgtctcttcccatctctctctcttttctctcagtctctgcctctgtttgtgtctgttttctgtctctcttttcagtatgtctgtgtcttcccctccctgtatctcccctagtctgtgcttccctttgtctcagcctggcacttctgtgcctctccttatttcttcagcgtgcctttccgcatgtttacccccttgtacctccatattctgtcctcccctatcctgggtcttcctacctgtcagcctttctggaacctggtgactgacaggggttgtggggcaggacccctgctcagagctgctgactccactgacagcgggagtgtggtggggcacagtaagctgcatcctcccccagccctaccccaccctctgtgacaggctttaatggatcctgtttattatggcttctggtttctccccagctcctgactcttcctccgttttgctcgggtgggctgtcctctggaatgtcagctcttcta

SEQ ID NO: 97637 - DNA, 44231 bp, Homo sapiens
  misc_feature (1)...(44231): n = A,T,C or G
atattgtatattgtcttctggtgcttattttttcctatgacattatgtaactactgttctcctgtgctgtcccacattcatttttgatgctattgaatttacattgtatgaatagatcacatcttgtttttccactctcccattgccatttgttttgtctccagttttttttccaataaaaaacaatgctgttatgcacattgtcatatgtgtctccaggtatatatgtgctaaactgtctcttatatgtaggtatataactagatgtcatattgctggatcattagagtttataaatattttactttacaagataacaccaatttatttccacagaattgtaccaatttacattcccatcagctgtatataattgatccaattgatccatatgccctcaaatacttggtattaccagacttctttatttttgcccattaaattcttgaactcagccgcccaaaatgttaagattacaggtgtgagtcatcgcgcctggccagaggcaacttcttagcaggagagggtatgccagaaaaacccagagagcttcacatgaaaatcatgtagggaggtcagttagcacacggataggggaagaagaagaggaactcttagagaacaggaagccagttttaggttcttcatcttctataatctcatatgtgaatgtgtgggcccatgcaacctgtgtggtaggttcagtgacacatagaatcagggaaactctcagcactgatgaggattctacatgagggataaacagcaatgtgaaatagaataaaatagcaatgtgatgtagaataaaatactccacagtaaagttttgtcatgtcaaaacaatttcatggtcaattatggatattcaaaccactaaaataacaatttggttgtaagttgtattggtctgttttcactctgctgataaagacagacccaagactgggaagaaaaagaagtttaattggacttacagttccacatggccggggaggcctcacaatcatggtgggaggtgaaaggtacttcttacatggtggcagcaagagaaaatgaggaaggagcaaagtggaaaccctgataaacctgtcagatctcgtgagtcttattcactatcacgagactagcacaggaaagaccctcccctatgattcagttacctccccctgggtccctcccacagcacgtgggaattctgggagatacaattcaagttgagattttggtggggacacagccaaaccatatcataagtttatctgattacaccactaaactttgatcacattcatttctttctaggtgtcaacgtagcacagaaaaattaaaagagaacattggcttgcacaaatgactttatcattataaccccaattttgattttctgtatttgtaattcacaaactagataaaattcacaaactagatggtagggcacttagaagtcattatgtttttttttttttaattgcaaaacacttggtctactaatatgtcaaacataaaaatctcagaatataatttcatactaaatcagattctgatttatacaatgtaataaaagatacaaatgtataagacaaatttatatttaattatctttaaataggaggctaaataggaggctattctatggtgcatttcccttgcaatttgggaaaacttttttgtacctttttcacgtagaaacattttgttccaacacagggaagcagagattgattccatttcccacaccacattgctagtgtcagagagatagcctgcggttctctgcatcgtcagagctgtttctcacactgaatctgggaatggcaaatttcttgttatgttgaattctgagatgagttaagacatggattgcactctttagcctttgctcctgtggatgtgggttctctgcgttatctgatgtcccataaattgttttgagaggctctgtcttccatcttctttatgagactgttgcatctcttacctttaacctgaacctgaaagttatcacagccaataaataaacaataactggctacttctcttccaacaagtgaaagcccacagaagataaatgtacatagaagggaaagcgattttctagcccttctgagaaaaagagacagaaaaagagattgtgcttattaaaagtgtcgttatggtttcattcaaacaggaacacagacaatattcagatggttagaaataaaggcaatgagttctcatttagtgtctggtgttacagaagttatttattgaattcttgcaagattggttgactatacctataagatcagttgggctctttgtgaatggttcatctttgacaactttaacaacttctttccagtggtgcagtaaaggattaaccttgttcaaagagaggcccaacctttgcccttggctcctgggaggtaatctctaagctttgaaatgtcctgcttgataagagtatcttcattactggggaccttgttagcattgtcaatgcttataatgtgatttatggtgggagctctgaccacatagcatcaactcaatttctggaggggccagagactatggtcagccacatgggtggtcagccatgtctatgtgagcaagtcccaataaaaattctggacaccaagacttggaagagcttccctgcttaacaatattctctgtgtgtattgtcacacatagtttctgggagaagtaggccctgtctgcacagctccactgggagaggagaactggaagtgctgtgactgactcctttgtttgggactctcctggaccttgccttaggtacctcttcccttggctcattttcatctgtattttttgctttaataaactctaatattacagaagttatttgttgaattcttgcaagattggttgactatacctataagatcagttgggttctttgtgaaggcttgagtaaaacatttgtaaaacagctttcagtgagttttgtgagtcattctagttaattatcaaacctgaagatggtcttggggacctcaaacttgcaatttgtctcagaaatgggtggtcctggggactcatgaaatttgtagttggcatcagaagtgggatttactggaatgaccttgactcaccgaagcttgatgaaagcatggtttgggcaggggtttatgaacctttgattcccagatggccgctaacctttaaatgcccctgtctgagtcccctgtcccagacttataaagatctcgtgaatatgtatgggaaatgtagctaagggagtctctggtttatattgattttgtaggtcttgggtcctcgtgctaaagtggctgagttgcacagaaggactctctgcacaaaaattaggaagggcaagataaaaactccacgagggcagggtccatggtgactcagctaaccagtctatctcaggggaaatagaaatgtcttccttagagaattcattcattccttcagcacttgacaatctacgaatcaactctgaagaaccaggcgctgggtgaggcttggaaacactaagctaaggagagcatagactttgtgttgaagagctcagggctggggaggtcagtgtgtagaacaaatggcaggttgttttttttttttattattgttgtttgtttgtttgtttttgctcttgttgcccaagctggaatgcaatggcgtgatttcggctcactgcaacctccttttcctgggttcaaatgattctcctgcctcagcctcctaagtagctgggattacaggcatgcaacaccacacctggcttattttttgcatttttagtaaaaacggggtttcaccatgttagccaggttggtctcaaactcctaacctcaggtaatccacccacctaggcctcccaaagtgctgggattacaggtgtgagtcactgcgcccagcacctttttttttttttttttttttgtgacagagtcttgctctgtctcccaggctggagtgcagaggcacaatctcagctcactgcaacctctgcctcccaggttcaaaggagtctcctgcctcagcctcccgagtagctgggattacaggcacacaccaccacacccggctaatttttgtatttttagtagagatgaggtttcaccgtgttggccaggctgatatcgaacccctgacctcaagtgatccacctgccttggcctcccaaagtgctgggattataggcatgagccactgcgatcagcctacaaatagcagatattgtgtgatagagtttgtcagggaccacaagacagacacacactcagtggtacagctgctccgagttctgtttccaggggatgataggtcatccacatgcctggtgggaaggatggagctggtgttggggtcaggattggagaggctgattcctaattcacattcattagtgggttccaacagctggatcttgttttccacctgtcgtgtgaggaagtttacccttctttgttatatcatgtcttgtgcaccacttctcaaggttaaggacatggccagatcaactctgaagaaattccccagggttgagggctgccccttgggagcagacaaaggagagaagagatgataaccattagacccgctggaaaaagctattcagagcttaaaaaaatgaaaacaaaaccacaaaaacctcatctatgtccagtgttttttgtgtgcatattctggagtatcatttttaatttgatcctgaaaactgccttgtgaaggtggggaggatgtattgttgaccctacaggctcagacagcaacaaggccagaatcacataggttgtaagttgctgaatgggagctgcaagtccaagtctttgactctaaatccagcgctctgtccagagccccgctgctgcctctgttggcagctgaagctgtcagtctgctgccccctgcccagttcagacagggtggctggaaatggaccaaaggatggaaaaagagaataagagcggacttgaagggaactgaaagtatttgttaaggggaaagcagaaggaagaaagaaagaggcatgaaccctggggcctggccttgaagcacagtgttccaggggaggggggatgccgctgtccccacccctccatgggggcctaagcagatccagagctgcctggccttcctggagggtggcgtccaagcatggatgggaaggcagcaaaaataggcccatgtcacttctgggagaagacaaaagagggaagagaggactactatagaaaagtagaaaaagaggaagggagggaatctaggcatacagatcggaaatgtggagcaaaacaaaatttttttttttttttttgagacacagtgtcgctctgtcacctaggctggagtgcagtggcgtgatcttggcttaccgcaacctccacctcctttgctcaagtgattcccctgcctcagcctcccaagtagcttggattacaggtgcacgccacccagcctggctaatttctctatttttagtagaggtggggattcaccatattggccaggctagtctcgatctcctgatctcaagtgatctgcctgcttcagtctcccaaagtgttgggattacaggcgtgagccactgtgccccgtgtgaaacaaattcttatgaaacaaatttaatttacatgtgcttaaactttggtgtcaacttgcatggaatccccaggcttgctagatttttctagtgcctccagcccttaggtctcttcctatgttctctcagctactcctcctttccttcaacactgttagccgcttatccagggccctacgtttcagcccactcctcctccagcccctctccactccacctccacaatgtctgttggaatggaacagttggggatactggctgtttggcccccatgggggtctctccatataggattcagagaattggaagacttcttgggctgaagcagagaacgggatgcaattttgaaactggctttgtgagtcactgtgaacttcaagcaccctcccacttgaggtaagcttcaccagtttggcttgtgggaactgtcagaccagctccaggcgctggggctttctcagyggccttgtcagctcacagcaggcrttaacagcctctaattgaggaaactgtggctggacaggttgcaaggcagttctgctccccatcgtcctcttgctgactggggactgctgagccygtgcacggcagagagtctggtggggtggaggggctggcctggcccctctgtcctgtggaaatgctggggcaagtggtcaccctcatactcctcctgctyctcaaggtgtatcagggcaaaggtaaggaggtcctacctggcgtggggcgagggagggactaggagctgtgcccctcagggagatcagagccagagcctctgcttgtgccacatacacagtcatctggaacttgactccgagcagctcctgacagctctgacagtctaaatcagacaggacaggctggcagtgcactgggaggtctgtgagaggggyatctggccctgccaccagcaatccagraagtcttgggtgaggagattccttcccactggcttcaatttacccttccgtgtagtggagagagaagcctccttccagccgcctgtaaagatgatgaaaattgcatcctccaattgtggcatgagagaagagaagcagtcccaaggaagtgggtggttctcgagctcagagacagatggatggacccctgaggcaggaaagctgagcccagggaggggagggcgaggccagcagccaggaagaagctggaaggcatggtccctcatctccccggcttcttcagccatccagatgccacaggagcctggaaattattagggacatgcagggttggggcagaagaaggagacaatatgaggaagctccacagcaaacctaaagctgtcagccaggcatggagccatctaacatttactcctggggatcccagctgagggctgctcccctctttctccagttctggggtccaggatgctctgaaacctggatcccgcatttaatttaattgaattaatttatttatttcatttttaatttttatttatttatttattttttgagacagagtctccttctgtcacccaggctggagtgcagtggcgtgatcttggctcactacaaactctgcctcccgggttcaagtgattctcatgcctcagcctcccgagtaggtgaaattacagacgtgcgccaccatgcttggctaatttttgtatttttagtagagaccaggtttcaccatgttggccaggctggtcttgaactcctgacctcaggtgatctgcccaccttggtctcccccatccaaagtgctgggattacaggtgtgagccaccatgcccagccagggttctgcattttagatcagtgactctgcaggggcttcacggaggtggagagcgtggaattagaggagggtacactctgggcacaaagaggggaaactgaggcatagtgttgtgtgggttcagggccaggtagaagccccatatgcaataaagtcccatgcccaggtactcaattcagttaccgagtccctgagcattcttgtgtccttcaggaagacacagtcaaggctcaggtggactcaacatttgtaaggatgcaggcagcctagggcagagcatgatgaggaayagggagcagggagggaggagtggagcctgcagctcttgtgggtgggttggggggcctagtggcccaggattctaggcaggagagctaggttggaacctggtctaaggatccttgaatgcagctcagacagccgaaggaggactgatgggattggtgcctggctgtggggatgagagtaacagagaagctgaggttatgaccctgaggtcatgagcctgtgtgacagagggcaatgctccctccacccccattcccagggcttcagcaccatagctgggcttggctatgccggcccttgcacggtgaagctggtgagtgacttgttaggcacagggagggatggacttgggtcttcctgagctgcttcctcctccatcctgtgtctatagggcaggcctggcataagttgactgaagctgctctatttctttaatttttaagctttttagtttgaaataattgtgaagttccagggaagctgcaagaatagttcaaacgattcttgaatttctttcatctagattcaccaattaacattttatcacatttactttatttctctttctctagctgtatgtatatgtgtgtataaatgtacaataatttttgctgaaccacttgagaacaagttgtgacattatgtccccttactcctaaatattttagcacttatatcctatgaacaaagacattctcatgttactacagcacaattgtcaaattcagtaaatttaacattaataccatcaaatatgctttccatattcacatattaccaattgtcccaagaatatgctttattttttttttttgctgacccaagatgcaatcaagatcatgtattacattcagttgttatgtttctcatgttcagtctatgaccatactttaacctttcttcatctttcatgatattgcattcttgaagaagacaagccagttgttttgtagagggttccttaatctgggtttgtctgatgttccctcatatgattcaggttatcatatgcatttttatttattttatatcatcattattattattttttagagatggagtctcgctctgtggcctgggctggagtacagtggtccaatctcggctcactgcaacttctgctcccccgggttcaagtgattgtcctgcctcagcctcccragtagctgggactacagatgcatgccaccaagcctggctaatttttgtatttttggtggagacagggtttcaccatgttggccaggctggtcttaaactcctgacctcaagtgatccacccacctccgcctctcaaaagtgctgggataccaggtgtgagccactgtgcccggcctattattayttttcaagagaggatctggttctktcacccagactggagtgcagtggcatgctcacggctcactgtagcctcgacctcgcaggctcaagccatcctcccacctcagcctccctggtagctggaactagaggtctgtgccaccatgcctggctaatttttttttttttttttgtagatacagggtttccccatgttgcccagggtggtcttgaactcccgggctcaggcgatccacctgcctcagtctcccaaagtggtgggactacaagtgtgagccatcatgcctagccatcatatgcatttttaaaattattttttctttaaaaaaatttttttctgtgcccattgacagcagatattatatgcatttttgacaggaataccacaaaagtgatactgtgtctttytcagcgcatcccatcaggagtcatatgatgacagtgaaatttaaaaaaccactttgtttactgaataatttaacaggagtactatttatgtaagatgtgcatataactcttgagcattgcgaaattcttccaaagacttcttctttcatgcagagtaaaagccatgcattttacaatggtgcgtgacctggcgtccaagacccactcctctttgtctctcctcttgctcacagcatttcagccatgytgcctgctggtcctggacctcgctctctgttgtatccacagttttctctgcctgggatgctgctccttygctggmtacatggcytcttccctcaacccctcagagttttgctcaaatacctccttttcagtgatgccttccccactgaaaatgtcagcctgccattctgcaaactcttagctctctctccacttaatttttctccatagtcctcatctccatttatgttccatcctgtttacttatgtttttcattttctgtctcccagtctcctcttcagccccctagactgtaagatccttgaggccagggcttttgtctgttttgctcaccgttgtctcctcaacatctagagcagtacctgccacaagtcaaccctcagtagatacttattttcacaatagcagccccctctctgttcccattctttctctggatatattttgaatagctctgaaccagggctattgaggattcagtggcaagtaagtccagggcccgtttgttcagagagcttgcgctagattgcctgagtcactgttactacagttgtgattagtgcctggtgcagtgccaatgcagtaggtgttcaaaacatgtttgttgagtgaataagtgaattattttcaggcatcttaacgggcagcctgggatgttttttgggttagacatattgggaaggagggatcttcaaatcattgcccagggaataggcctgggccctaaaattcattttagacccaaaattcaggtttcagttgtccgttctgaggaaaccccaaaggacacacaggctggaggytatgaatccccagatgctttacagcctgagttgagatctgctggacaataaaagggcacaggtgacaccttatagattagctccaagggttgccagctgtttgcgtagattgtgttggaactgtcacttctcagggagtggtgtctaactgcgactgctttggctgggatccaggcaagctgtagaagggctggagtcgtttttgctcttctcttcctcattgcacctcccctccaacaaagggtgaatggcaaagtagctggacacagaaaagagattggaattcaatgtaccctgggctacagcaccatccagaaaggaatccactgaaatcacttcaaggagagacagggcatgtcttgtttttttttttaattttttatttttatttatttatttttatttttttgtgagacagggtcttgctctatcacccaggctggagtgcagtgatgtgatcacagctcactgtagccttgacctcctgggctcaagcaatccttctgcctcagcctccttagtagctgggactacaggcatgtatcaccacacttggcttatttttaatttttgtgtagagatggggttttgctatgctgcctgggctggtcttgacctcctgggctcaagcaatcctcttgccttggcctcccaaattactgggattacagatgtgggccactgtgcccagccaggccattgtcttcacagacaaacctctcttattgaagtgcaacatacagaaaagtacacaaaattacaaatgtacatctcaatgagctattgttaaatgaacacactcttgtgtctaccacatgttctctcccattcattacttcctctgtcttccataaatatagccacaattctgacttctaacatcacagatttgttttgtccgtatatatggaatcaaacggtatgcactcttgtgtctgactacttttgctcaacatcttatgagatttatgtatgttattatttgtagcagatcattttcatggctgtatagtattttatcgcatgactatatcatagtttattcaccttttctattattgatgaacctttgggttgctttcaattttgtttttgctattataataatgctgtgatgagccttttgtgcatgcatgtctgttgggtatatctctaggggcagaaccatggagtatgtgtacgtaactctagcagatgctgtcaaactgttttccaaagtggttgaaccaaatagtgcatgagagttccatgctgctttggggccactggcttttggttctgaaggtctgcagatggaaaattaaattgtggaaatgtggagcttggcaagaggccaaaggcaagggaattacagctctgtgatttctctggtatcctgcatgaaattctgacaatagagtcatttttaggagttatgtgagatgcattgttgaattaattaatttaaacggattcatgaagcccttgcttgggttgttcattttgctgttgtgacgtttgaatttcttgtctattctgcatattagttgcctgtaggattcatagtttgcaattttttttcctattctattggttgccttttcactctgtgaattgtttcctttactgtacatgatttttttttagtttgctgtaataccatttgtttattttgcttctgttgcctgtgcttttgaggtcttattcataaactctttccccagcccttattatgctccaagaactatgcaaggttttgtgggggaaacaaagatgaaacagatgtctattctacccttaagaatctttcagacagaggaaaatgggtatgtataattacaactataagggaagatggaaatgctatgtgtcattaacaggcaagatacatttagaataaaaaaggagctaagaagatgaagattccttctaggtaggaacactggggaactggccttgaagaataaataagagtttaggaggtaggtacaaagtagaaggacaattgaagcagaggaaacagctcagaaaagccagggttgcatggggtttggatgggaaacaggaaagggagatgcacttgttatcatggagaaacaatatcacatatgagatgatttggttaactgatgcaaagagtgggacttgggctaggtgagttttgacagaggtaagggagttgcattgcctgaggaagagagttaatatggtcagtatgaagctaaatagagaggaagaaagaaatgggatgtgggccctataggatactttatctatcttatgattttgccctgactagagctggattgccccagtacttttggaatctcactggactctgttcacttagtccccagcaggtacatcttttgatgccttcaccccaagcctggtagcacaagccctagctgagaaaaccttaacatctatttgttggctggtggaaattccacttgctctgagaccctcccgtgctccttctcccaggtgctcaggccccacaccttcctccgactggcaggtccaggttggaggaagctgagctgactcagagctctgcacatgggctcagggctgagcgggactcactgctggatcagattgtctccttcaccatcctctgtacttgtctccttgaccatcctctgttcttcctgaggctgcagtggagttaatcatctgccctctgccctccctttcacagttactagttcacctcatccgttcttaaccacaggaaggtggcccccaaagctgctgagcagtagcaacagcagtggcaggggcccgggggccttcctggactgtggcctctttcctctaaacaattttcacttgttgggtcctcctctatgcctcactaaatgtgtgagaacttgagttgaagttatgttttcgtagtaaggtatcgagctcgnnnnnnnnnnnnnnnnnnnntttgcctctgctgagggcaagagtgttcttgccctgtccttgaccaatactcccctgtgtgctcagggcaccagagcttctttcagaagtcacctgggacctgctgtctgtgaagacatccctcatctttcttcagctgctccttttctgtgggcttcctacctttagtacagtttccttccagttgaaaaatcaaaacaacacctggtgttctctctagctcctttttatttgcagacaaaccagtcttaaatgtataaactaatataatattacataaaaataaaatataacggcctaatttttaaaaagaccccaaaggcagtatagcatgaggactgtagatcacacatttcattctttaagtatttagaagtctatggctgggagtggtggctcacgccagaactttgggaggctgagacgggtggattacttgaggtcaggagttcaagaccagcctggccaatatggcgaaaccctgtctctactaaaaatacaaaaaaaaaaaaaagaatagctgggggtggtggcaggcacctgtagtcccagttactcatgaggctgagacaggagaatcacttgaacctgggaggcagagattgcagtgagccgagatcatgccactgcacaccagtctgggtgacagagcgagactctgtcttaaaacaaacaaacaaacaaagaagtctagacaataacttaaccattttcctgtgtgattcctattcagttttataatagcagagaacaaccttcttctacatagcgctctacattctgatctactggtggattatatgggagtttacgttatttttcattacaccgtatatttatatttaagtaccttttaatacttgtgctacctctcacaattttataaaagataaaaataaagtgaaaccaccactaaacacctgaaaattaaactcatgttccatcaccccattctccaaacctgctccatctttaccagacccataagccacacgtgtgttttgtgttcccttaaccatgctactgctgkgtccataatacccrccttccctgttcctttctgcatacaccaggcaggccttggctttttctttcaatggcagctcccacccaccgcctctgggcagccactcctaactctgcagggcagaggaaaacatgctttccttatgcttgcctcacaccctgggcacacctccatagcacattccatattgcatttcagttggctgttttaggtctatcttcctttttcactttttttttttttttttttttttttaggcagggtcttgctctgtcacccaggctggggtgcagtggtgcagtcatggctcactgcaacccctgcctcccaggcttttctgatatttagctaagagttgggtttagctgagatgagtgaggaaatctacaaattcacttgctatggtaatgtttccacaatgggcaagtcatattttgcttttatcaaagtacatcttagttaatagtcagaacagttgagtgagaggtagtcattactctttttctgcttttttaccaagatacaactcacagctgtgtgcacaaaatttaaatcaacagcttgatgaacttttatatgtgtaagtacatatcaaaactacccacatcaagatgtaacacatttctagcacccagtcattcctttttggcccttcaagttgataacccccctcctgcaagggtaatcacattctaacctctctcaccatatattagtttttccagattttaaactttatatcagtgaaataattcactatgtactttttggagtctagcttcattaatactcatcattgtggtgagatccatccacattattgccaggaaaagtagcttttctttttcattgctgtgtaatattccttataagactataacacgatttatttgctcatctaatcgtgatagacatttgggttttttctcattttgagttattatgactaaagccattattaacactcttgtacatatttttagtggatataaacaccagattttctttttttttgagacggagtttcactcttgttgcccaggctggagtgcaatggcatgatcttggctcactgcaacctccgcctctcagatttaagtgattctcctgcttcagtcttccaagtagctgggattacaggtgtgcactgccacgcccagctaattttttttcttttttttgagatggggtttcaccatgttggccaggctggtctcaaactcctgacctcaggtgatccgcctgcctcgacctcccaaagtgctgggattacaggcatgagccaccatgcctggcccagattttcttgtgtacaaattcttctggatcaaagggtatatgtaagtttagttttagaagataccgtaaaatagttttccaaagtgctggtaccaatttacactctcactagcaataaatgagaatctcagttgctcccatctctgtcaacccttggaattttcacatttatttatttacatttattttcgagaccaagtctcagtctgtcacccaggctggagtacagtggcgtgatcttggctcactgcaacctctgcctcctgggttcaagcaattctcctgcctcagactcccaagaagctggtattacaggcgccaccaccgtgctctgctaatttttgcatttttagtagagatggggtttcaccatgttggccaggctggcctcgaactcctggcctcaagcgatccacccgcctcggcctcccaaagtgctgggattacaggcttgagccgcttcgcccagccttcagacctttaaatgttagctattttggtgggaatgtgaaatctcattattctctgataactaatgttgttgggcacccttatgcatgcctattggctattggatattctctttcctaaagtgcctgcccaagtctgttgctttttttgtcattattgtcatcagtgtattattgatttccagtctattattgtcatcagtctattattgatggaattctttatatactctggatatgagccctttttcaaatgtatgtattgcaaacattttctcccagtctttggcttgctttttcactctctcaatgttgtctttcaccaaacagaagttctaagttttagtgaagtccaatttatcaatattcttttatggttagtgatttatttktgtgtgtgtgtgtcctgttaaagaaacatttgttgtytgggtgcagtggctcatgcctgtaatctcagcgctttgggaggccaaggcgggtggatcacttgagcccaggagttcaagacaagccttggcaacatggtgaaactctatctctaccaaaaatgcaaaaattagccagtctcataatctggtctcaaaataaacataaaaatagattaaaatgtaaaaataaaaaaggaaacatttgtctatctcaagatgtagaagatattctcttgtgctttttcctggaagctttataggtttagctttcatatttaaatttatgatttgttttaaattaatttttgtatatgatatgagggagatatcaaggttttttttccttatagatatcaatttgaccaagcaccatttattgaaaagatcaagtatgtgttggtttgtgtgatattgtgaaatatatatttggttttcaacctcctttcctggcatacaattcctaaaatttttagaaattccgaagtgatgtctttttgtaggctaatgaggtgaccgatggctggcagcctgtaggcagcttcgggataggggccggtcaccagaaagaccaaggcagggttggaatattggactctgagcccgtccccaaccttcaggaaaaggagagggattgaaggttaagttgaycaccgatggccagtggtcaatcattcccatttattgaggcctccataaaaacccaaagaacaaggttcagagagctaaacatgcggaggttcctggagggtggcacgccctgggaaggcatggaaactctgtatcccttcccctacaccttgtcctatgcatctcttcatakgtaccctttgtaataacctttataataatccagtgaatgtgtttccctgagttctgtgagccatctagcaaattaattgaacccaaggagggaataacgggaaacccagtttatagctagttggtcagaagcgcaggtaaaacaatctggagcttgcagttggcatctggtggatatctacaggtagatagtgtcagaattgaactgaattagaggacatccagttggtgtccactgaagagctgattgcttgcttggcacgtgggaaactccccacacgttggtcacagaagtcttctgtgttgattgttgtggtgtgaaaccagaggaaaaacagttagtgtttttcccacacacagggtctatttctagactattatattccatcgactacttttcaatccttgcaatactggaatgctatcttaatttctgaagttttacaatatatcttgatattaggtagtgaaaaccttctagctttgttcttcatcaagattgccttggctattctatgtcttttacattttcatataagttttagaatcaacttgttaatttctataaaaataacctgcaataatttttattggaattctattgaatctataaattaatttaggaagaattgacatcttagcaatattaagtcttccaataaaaaccatggtatagtctcctgtttatttagctctttaattttttctcagcaatcttttgttgcaataggtgtataggtcttaaatatttcttcttgaaattatttctatatattttatcttttttgtgctgctgtaaatagtattgttttcaaaatttcatttttatctgtttgtactaatatatagaaataaaaatgatttttgtatattgaccttatatctagcaattttgcaaaactgacttctacactcaaataatttttcatatagtcctcttggtttcctatatacacaggtatatagtttgtgaataatgacagtttcacatattcattttttttttgagatggagttttgctcttgttgcccaggctggagtgcaatggtgccatcttggctcactgcagcctccgcttcccgggttcaagygattctcctgcctcagcctcccgagtagctgggatttcaggtgactgccacccgcctggctaatttttgtatttttagtagagatggagtttcactgtgttggccaggctggtctcgaactcctgacctcaggtgagctgcccaaagtgctgggattacaggcgtgagccactgcgcccagcctcacatattcatttctaatttttattccctttgactattttccttgttttgttgaactagccatgacctccagtacaatgttgattaaaagaggtaattatggaatcctttttctgttcctgagtttgcagggacatggatgaagctggaagccatcgttctcagcaaactaacacaggaacagaaaaccaaacaccacgtgttctcactcaaagtgggagttgaacaatgagaacatatgggcacagggacgggaatatcacacaccagggcctgttagtgggtgaggggcaaggggagggaggcattaggacaaatacctaatgcatgtggggcttaaaacctagatgatgggttgataggtgcagcaaaccaccatggcacacgtatacctacgtaacaaatctgcatgttctgcatacgtatcccagaacttaaagtaaaacaaaaaaaaaaaaaagaaagagatgggtacaaatgtgaatgtttgttgttttgaacaaacctctccaaccatgtttttcctctgctcccacatcaaaataataacaatcatcaacatagaagacttctgtgaccaaatgcagggaggtggatttctcctcacagcaaactgaataatgtattctgcagtggacaccagctgggtgttctccaattcagttcagacactaactggagagagtgtcagaccacagaggctgggggctcagtccccaacaccacccctccaccacaccagttctaagtctgggcctccagaacttcggaccaaccagcttccagttggggttctcacaaccccctccttgggttcaattaatttgctggagtggctcacataaaccagggaaacatttatgtttgctggtctattataagagatattacaaaggatacagatgaagagatggcatagggcaaggtatgggggaagggacacgaagcttccatgccttccctgggcacactgcatgccaggaatctccagctatctggaggctctccaagcccagtcctcttgggtttttatggagacttcacttcataggcatgaccaacaaccttgtagaaatgtgactggatgaaaagggtatgattccatactaacaggctgagtggagaaacccagcaaggcctgtctgttcagattcttcttggtctctctgtgtagcatttctttctctagaatctgaggcaggaacttctctgaaatgagggtcttttgatttatatcagattagagttgtctacactcagcaatggtgatcttcttgctggtcttgccattcctggacccaaagggctccatgctgtctgcaatattcatgccccctttcaacttgccaaataccacacgcttgccatccatccattcagtctcggcaatgtagatgaaaaactgggaactatttgtgttgggtccagcatttgccatggacaagatgccaagacctgtatgcttcaggatgaagttctcaccatcaaatttcaccccatagatgaacttgccaccagtgccattatggtgtgtgatgtcaacatcctggcacataaattctgcaataatcctgtgagagcaggagctcttgtaaccaaatcatttctctctagtgctcagaacacaaatgttttctgctgtctttggaactttatgtgcaaacagctccaaggagacacggtccaagggttcatggtcaactgctatattaatgaacatggtggggttgactacggttgatagcaagagactctaggtggtgaaggcacctccaaagcaccaggtatatacattttaacacttttatttaatgaatttacttttggctttgctaattttctctattgtgtatttgctttttattttattgaagttagctcttacatttactttctcctttctcctttctctggattatcatcatcatcatcattatttgaattactatttctttttctttggtttcttgagattgaatcttgcattattgacttgcaaactttctttcttttccaatatacaaatttaaagcyataaatttccctctaaacactgccttagctatattgcacatttgatactcattatcactttgctctaaatatttcccaaatttcatttgatttattctttgactcatgggtttttagaaatatgtttcttatgttttaaacattcagagattttctggttatttttctgttattgattttttgtttaattctactgtgcttagagggcataattggtatgatttcaatactttgaactttgttgacacttgttttaatgcacagcatatgataatactttggtaactattgcatgtgcacttgaaaagaatatgtattctgcaattgttaggagaattgttttatatataatttatatatatattggtttaatgatcttcaaattcttatagccttattgatttttttgtgtgcttcttgtagcagctagagagacagatgtaataaaactctccaactatagttgtggatttacttctccttttagttctatcaaattttattttatatattttaaacttgttatatgcatagaaactgaagatgattgtttattcytacttaattggttcttttataatgatgacatttccttctatttctgtatattttttatacatcttatgtctttttttgttcattttctccgttattgccttcttttgtatttaattgatatttttgtgctgcatctttttgattcccttctcatttctttttctgtacattttgttattttctcaatggttaccacaggtattacaatgaatacctccaacaatatagtttgaattgatgccaattcagcctcaatactatagaaaactcctatacagctctatccccccacttttattgtcacaaattacatctgtttctattgtttttcacttcttgtgcctgagtttccattttctttatatctaaagaacatcctttggtatttcctttactgcaggcctttttgtgacaaattctttccgtttttaattttttctaaaaatgtctttatttcagcttcatttaaaaaattattactattttttgagacagtctcactttgtcacccaggcaggaggggagtggcaccatcttggctcgctgcagccttgacttcctgggttcaagtgattctcgtgcctcagcctcctgagtagccgggattatgggcgcgtgccaccacgctcagctaacttttgtatttttagtcgagatggggtttgccatgttggccagcctggtctccaactcccgacctcaactgattcacctgcttcagcctcccaaagtgcggggattacaggcatgagccactgcrtctgctttcatctttgaagtaccgaaattctagataggcagttattttctttcagcactttaaatatatcattccttggaaaaccaaacaacgtatgttctcactgatacgtgggagttaagctacgaggatgcaaaggcataagaatgatacagtggactttggtgacttgggaggaaaagtgggaggggagtgagggataaaagactataaatagagtgcagtgtatactgctcgggtgatgggtgcaccgactcacaaatcacctctaatgaactttctcttgtaaccaaacaccacctgtaccccaataacctatggaaaaataaaaaaaaaagataccattccatcatctgctttttattatttttgctgaaatgtcagctaagttgtttgttttgtgaagggaatttagttttcccccactctggctattttacgatttttctatttatctttggtttccataatttttttgatgtattgagaggttgtcttttgttcattggtttgttttttttctttttttttttttgagacagagtttcactcttgttgcccaggttggagtgcagtggcgtgatctcggctcactgcaacctccacctcctggattcaagtgattctcctgcctcagcctcccaagtagctgggattacaggtgtgcaccaccatacctggctaatttttgcatttttagcagagatgggattttgtcatattggccaggctggtctcaaactcctgacgtcaggtgatccatccacctgggcctcccaaagtgctgggattacaggcgtgagccaccgtgcccagcttgtyggtttgttttgatcttgcttggggtttgtaacacattttacaaatctatcttgatggcttttgtcagttttgggaaattcttatcttttatctcttttgcttagttcctctttcctctctcgtctccttgctttccaattacacttagtttaggggttttgttttgtttttgctatatctcaaatatctyttacactccttcttgtgtatttttatccttttgtttttctttacttcactctggatattttataacagttttctaattctcttttcaatggcatctaaatggcctttttaacctttcaattgagtttgttttacagttattttacattttatttctgtaattttcattgaattctttaaaaaaaatccaatttcaggtaactattgctgcataatgacctactccaaaatccagtagtttaaaacaactacctatttagttagtgattctgctagttggcaatttgggctgggctcagctaggtggttcttttggtttcctcttgcatcagtcatgcatgtgtggtcagctgccagactggccacgggtggctgattcatttatttattttttattgttttttgagattargtcttgctctgtcatgcaggctagagtgcagtggcatgatatctcggctcactgcaagctccatctcccgggttcaagcagttctcgtgcctcagactcccaagtagctggggttacaagtgtgygccaccatgyctggctaatttttgtatcgttagtagagacgaggttttaccatgttggccagggtggtctcgaactcccgaccttgagtgatctgccggccttggcctcccaaagtgctggaattacgggcatgagccaccgcaccaggccagggctagctgatttagaatggccttagctgtgttggcttatctctgtatcatgtgatatctkattctccagcaggctattttaggcttgttcacaggtcagccagatgaggttccaagagaacaagtagaaatgtgcaatgccttttcagatctaggcttagaactrgcagaacatcatttttgctgcgtttcatcatgaagaccagcccagttccaagagacagggaaatgaaccccatttcttgataacagaaggagctgtaaagtcacattgcaaggacatggtatttttgcattctatcacgctagttctctgctgaaattcttaaacttatgttttatttccttgaacatattagacatgattactttaaagtttatgactgacaactctattatgtagatgccctgtttgttggtttctgttgtctctattcttctgttggtttttggagatgtttccttttcttatacttcaytttggatattgtgtatgaaacattctaggaataatttaatgctctggttgatgttattttcctctagtcataacttatatttgcctctagttggcagccaggttagggctaccagagattccagatcattagttcaatccagggttgtgatgattcaaaattgagcttcagttcctgtgagggctgttcatttctcgttcactcttactctttgggtatagccctctgtggtaccaacctcaacactgatggattttangtatacccgctttctaataggagggacgtgaacttcatgttctcttagttccttgagttttattgtgagctctgctcagcttctcagccttttagctgccatttatggaatcagaagatgcctccagggaacaacagtcagaaatgctgatctcacctctctgaatttccttcttccagatattggccccataatttttcactgctttataaactctctgataactttaacaatgtgcttttacatgttgttcatttttcttctagctatttttagtgggaggattggttagcatgtcttaacctggattttcattacataattagaattccttcgatgattttttatctcaacaattaaggrgatgctgtagaatgaaagtgttctgtttccagatcacaaactctctggagtcaggaatcatgccttatacatgaagaggccctgcctcttcaggggctggattgcagtgggactcagtaaggactgaataattgatgaagacagtatatgtcctccttgtaggtttagtaatgattttttccattcacctttgttctcagggtctttgtgcaatatttggtaggttgacttgttcttataaatagtgctaggatcgtaggagacagagacacagagatgcacagcacagtctctgcttttgagaagcttttggtttgctaatgggcagagccagtacaagtcatataaatataaatgggaacctatgtgttttagtcttaggagcatcaagatcaaagaaacatatttcatcaaacaaatagtattacaagtcctttaattatttacttagtctcttgagaaaatgccagggtgaagctgtggcttggagagactgcattcataatgcactggacatataaaaacccctctgtctcaattgctctcttcttaatagcctccattttaacggagccacttgtaaaactctccccatctcttattttctcttccaaatcctccctgagcctccccaactcacccagagagactttttaatttcctgcacctgctgggccatgccacatagctttattactaaaaatggctgtaggaacttccagttttgtacactgactgcacagaattgctctaggttgtcacacccccatattcattaggtttcatcttgattctttgagaggsaagtgctgggatctgcctgggaagtgtagttttatttttaaaattgttttctagggagaaatttttgtggagactttctgatcactgaaaaactggcaaacatcaataagtaatgaccaaaatccaatgaaccaagtgccacgagagaggattatgtattcagctctgtgagaggatggttgaggggccatgagttcagcttggacggttagtcttcctgggcctgaccattcagaatttccaacagtcactacttgccattagtagttgcctcagcactgcttggagggagtcaccttagatgtggtatttatagcatcatggttaagaatttatcctctcaagccaaactgctgtctttacaaagagtaaacaaataagctccctagcacctgtgctcccagctactagggaggttgagatgggaggatcacctcaagcccaggagttcaaggctgcagtgagctgtgattgcgccactgcactccagcctgggtgacagagtgagaccctgtctctagaaaacaaaacaaaagaaaacaaaaacataacaccaaactgactaggtttcaggctcatcattcttttaactcatcataccttttaacttaaatagttaaaatgtataaagtgtgaaacctgcctgtcacatagtaagtactcaagattttagctattggtctatgggatccctcagactagggacacagagcttggggacaaggggaggcagatggaggggataygctttaaggtgctcctaggttctgggctcctcatactcatccccacccaattggcttaagggaagtcacatccagctgcccacattgctcaggcctgacactcttcccgctactttcagcttgggttctctttcctaggatgccagggatcagctgaccatgtggttagcatctcrggagtgcctcttcagttacaaccaaacagcatacagacgaaggttgacagcattgcatggaagaagttgctgccctcacaaaatggatttcatcacatattgaagtgggagaatggctctttgccttccaatacttccaatgatagattcagttttatagtcaagracttgagtcttctcatcaaggcagctcagcagcaggacagtggcctctactgcctggaggtcaccagtatatctggaaaagttcagacagccacgttccaggtttttgtatttggtaagtctccaggactgttcatactgccctctctgattcctataggcctctaagttctgtatttccaatgcctttctgatcagaatctctgcttccagataaagttgagaaaccccgcctacaggggcaggggaagatcctggacagagggagatgccaagtggctctgtcttgcttggtctccagggatggcaatgtgtcctatgcttggtacagagggagcaagctgatccagacagcagggaacctcacctacctggacgaggaggttgacattaatggcactcacacatatacctgcaatgtcagcaatcctgttagctgggaaagccacaccctgaatctcactcaggactgtcagaatgcccatcagggtaagtggaacacactgggctataacaagcgctgaaggtttggaccccgcaaccaggctcatgtgcaagacagatgtggtatgagataaaatcccttggcctcctctcccagtgccttgtagcccttcccagggtagccctggcctccaggcacacagttcctgtaaagctaggcctatcctactctggaaaaaaatgttatccctatttccttctgggagatgcaagcttttcttctgcagagggagggcatagttgtttggtgagtgacagtcctgaaatggctcctgaacattattttcttcctgggagaggctgatggagaactgtcctctcctcttgagtgataactttctccaagccacatagttcaagaggtarctacactgtgcagcagtagcctggagcaggagcatcaggatgaccccagggatacctagatgagttcttgggctgttgcttatgctcatcctaagagttacctgagttaccgttccacaactttttattacataaacagggacttaatgtaccagcagcatgggcattataggaaaaaaaaaccatacagctctcattcataaggaacttatagccaaatggggcaacaaaaataactacttgtggacaaaaaagaaacaagactgargcaggccgggcgcagtggctccctgtaatcccagcactttgggaggctgaggtgggtggatcacaaggtcaggagtttgagaccagcctggccaacatggtgaaaccctgtctctactaaaaatacaaaaaattagctgggcgtgttggcgggcacctgtaatctcagctactcaggaggctgaggcaggagaattgcttgaacccaggaggcggaggttgcagtgagtcaagatcatgccactgaactaggacactggcttcatcattcagaagctctgtgatctcttagaggtcaggtgtggtggctcacacatgtaatcctagcactttgggaggctgaggcaggtggatcacttgagtccaggtgtttgagaccagcctggacaatatggtgtaatcccatctctatttaaaaaaaaaaaaaaaagaagctctgtgatctctggcagattcattaacctctctgagcctcaattttcttcccccttgagtaaaatgggggtgataataagtacctcacaggattgctgttaagagtaaatgagataatgtttgcaaagagccttgtcagcccttggaacacttaattccttttccttcctcttgttggmtggattatatatcaggctacatgtgtgacacaaatcttttaagtagaagttcaaatgaggaagagccatgaaggaaggaatagtggaaaagtgagacggaaaacttgcctgtacaatgagtattttttgagttaaaaacaaaggaatggataaatgtaacatttgttgtgctacatgtccctcagtatccatgacgaattagttccaggacccacctcgcaaccacagatgccaagatccacgaatgtttaagtccctggcataaacaggtgcagtttttgcatataacctatgcacacatccttctgtataccttacttaagtcacctctaaattagttataatgcctgatacaatgtaaatgctatttaaatagttgttatactgtattgtttagggaataatgacaaggaaaaaggcctctacatattcaatacacatgcatttttttyccctgaatattctggatccacaattcattgaatccacattgtggaactcaaaactttggagggcaactgtattagatcatgtaattaacccctataggtagataacgttatccccttttacaggtgagaaaatctaagaggctctgaggcatcttccaaaaataagatgacttgagaggcccagagaggttaaataaatagtgcagagctcacagggttagaatttgagccaggcctgtctgatatatctatgctcttggcatcactcagaggaggttaacyaaatgagcaaagagaaaaccttgaccgtgagttctcagagcacgaggcaatcagccacaacacagagaaaagtgggttttgaggcagcccctgcagcaggcaggtgggaaggaagaagagagcgagctgacagctcagttctcacgccttctgtattcctcagaattcagattttggccgtttttggtgatcatcgtgattctaagygcactgttccttggcacccttgcctgcttctgtgtgtggaggagaaagaggaaggagaagcagtcaggtgagtggaaggtccttagggtggtgctcctgcctgaggccttggatcctgtgactttgtyctgcgtccagtgggatgtktctgggagcacagcatctccttttcctcaacgagctttggtatgtttgtgtgcgtggtggcggggggcaagcaggttgctaggctctctctcccagttcatgccttctgatcccaatgcgcagatttccctgtagacagctggtttgggaggaggtgtgggaggggcagttcsgttgctgcctctgtgctctttggggttcctgggaagagcattaacttgcctcctttctagaaccttttttaaggtttggccatttggggtagaggtgggacctgttagaagcaaaagcccttctggaggtttctgcagctctgctctttgttttcttcctccctcagagaccagtcccaaggaatttttgacaatttacgaagatgtcaaggatctgaaaaccaggagaaatcacgtatgtcatcccggaggctggggtctctctcagctggcttggaaaatgctctttcaatgatggttattcagagcagagggacaaaaaggactgaacgactgtccttttgatgtgaccctcagcccttccccatctatcttttctccacctgcttcctagttctggtgatggaggaaaagaggaaacaaaaggagcagaggagatgaaagggaggctgaaggggcatcttggtgcagaattgcacctgctgagaagggatggagcacaacagaaatcaatgacagaggcagagtgctgctgtggtatttgttgtctgaccacaaattctttttcctaatgagtcagggcttacattcatgagtcccttaatggtgacacaggctgggaagtgtgaccagccaaagcataatagttttgtagctggctcaataggctgcattcacagccttttgsaagaagaggcctgagtgtggctgaggtactagagagagtaaccagcctggcacaaagcccaccagcctgagtrggctcctccaggagcctctcgcctgctcttcgcagcaggcaggggccaactctgcctgtcatccaagaattagaagaggaggaaattgcagagggcctgcagatgcccccactgctgtgtctcgcttagggcagatgtggtgacaggcccaggggaaaagctctgatggagcctaccaaactgctggcaggaagtggggcagggtgggtgaagtggggcggaagtgccttctttccactgccccctggcgctttgctgtggagacccagcagcacgcaggaagcacatgtggtggggctcttccgygctggccacatacgtgaggccctgtgcagcctcgcagagcaggcaagcatcctctcccagatgcctctgggttcagaggctgttagagcagctccccatgcctgtttttttatttttatctttatttatttatttatttttgccccagcagtggctatgggaatgtgaaaaataaagcagtggctattggaatgtgaataataaaaggggactttgtttctctcactgctaccagactctggtacaaattcctgaragcatgtgaatctacccacagccagtgatgcccgggtgcttgctaaaaataatctatttttccaaaaagaagatgacttgagattaggagaccacaggaggaaaaacaacttagagcaaaggaaacctctttgggattcaggcctattagcttacttcttccgactcaagagctcctccctgcctggcctcagccctctctggcctctccctattgtctcagggctccaatttgaaggcctaaatctcaagtttcatgtggtctcactttgagacccagctctaatctttctagaaacacttcacacgggtctggacgggagagaaaagcaacaaactcctgcagtattttaaaacacaaatgaagttattgacattgtcagatgcccatgactccccagcctctaaggacagctgacagttctctgcttctcttagcttcttcttgcttccaggaattttgcttgcaccttgcctaatgaaccctgctgcctccactggctcccagtagaacccaaactggcaataygctttcagtggccrgcagcatgaaatacctccaccaccgatttcctaaggggtaggaacaagaaaagggaagcaggaagctctgcttcctgctttggcccttgggttcagggctgcacccagcactatagctgcccagggcgctgacttgaggtcaagggcaaggtggcctcaaagatgatctagagagggcttaactgtgtttggtctttgaaatgtttaaactttctgaatttcagtgctctgaggtaaggctcagataacagccctactcagagctctgcaaggaagggtttctaagttactaaaggaaagaaagtgacagcattctctttgagcagggttgctggaacccctcacacctaggtggttccttgctcctgatactaatggttccactccaaactgctcttcttcctgtctcttcccatcttgggaggatcaatgactctccccagtcctgccacctccctcccagtctcctgaaaagccctcttctttgtgctgtttttccccactcaatctaaatctggacagaccgaactgtcgctcatgttaccccatctccatttcttgtgcaggagcaggagcagacttttcctggagsggggagcaccatctactctatgatccagtcccaggtacctctccagtttctctagtccattccatacctatctctggggtttcctaatgcccccctgaaactcacaccattgaatggcagaataagatcttggtgcttctagaatccagaagatagcttggcttcagttgcattaacacattatttgaaaagatccgtgtgatactagagcatcttaacacagctgggaagcctgatgtggacattccttcttcttccgtgtctggcagaaggtctggcccagataaagtctataggagcagaaacctggttaggggactcaacttctgctttcttgccctgctgctgcttctaatacttggggcccttgcactttttatccctattccctattatattcgttttcaggaaagaatgaatctgcattgatctcttttattttattatgacttagcaataatgtccattttcttttcttttaaaacaattttattgtttagagacagggtctctttatttattttttatttccataggtttttttgggaacaggtggcatttggtgtcatgagtcagttctttagtggtgatttgtgagatttttggtatacccgttatgagacaggatctcattctgtctaccaggctgagtgcaatggtagaatcatagcttactgaagccttgaattcccggcctcaagtgatcctcccacctcagcctcctgggtagctaggtctgcaggtgtgtaccactgcacccagctgtattttcttactaaatctcacataacagcctcatgaaaatagttctaatactttagatgtggtctacattccatatcacaatgaggaaaccgagactcaggtcaactgatatctcaaggctacatagctaggtagtggcagagctgagccaaagggtttctgagtctccattgcacctcctcatactccacctcttatattctgggattacagaaattcactcataaactggagaagcatcctttaatactgatggctaaaatgacattgataacccaggctgggacatctctcccaagggaaacactgcctcctggtgcccagtaataaaagactttctgataaaaatggctttaaaaaaaagaaaaaaaaaattgagcaccatcttcagtttggtggctgagctgtggggcaaagaaaatctgattataagagcggttgatatctgccagttctctagtttcagccacattgaactccaatgagaggaatttctatcagtgcaagaaagaggtcccctcaaactatggtgttgggtgagaatgacagtcctcctctggagcatcttaaaaggagaatgtttacctgatttagaggacacctggttccagtccagggaagggaggcaagttgccaaagggaggcattgaggtgttgaggaaagagccctggagagtcttgggtttgaattctgcttctactgtgtacgcactgcctgacttgggctatttatccttttggagcctcatttgtggcatggggcaaattatgatcattcttattttataggagtgttaaaagagttagagaagaggccaggcgcggtggctcatgcctgtaatcccaacactttgggaggccgaggcgggcggatcacgaggtcaggggtttgagaccagcctggcccacatggtgaaaccctgtctctaaaaatacaaaaattagctgggcatgatggcaggcacctgtaatcccagctactcaggaggctggggcaggagaattgcytgaacccaggaggcagaggttgcggtgagccaagatcgagacattgcactccagcccaggcaatagagcgaaactcttgtctcaaaaacaaataaacaaaaaaacagttagaggagaatacatgtataagataaatgctcaacaaatagaagctttcattaatgacagagcgagactagcactcaggttgtctgacctcctggctagtccagggctcttttcactaacacttgaagcttccatctgggcagggttgaggaggagaaacggaagagataacctttgtaagattgtgctggatctgtgcttctgaaatgattttatttctcttctcattagtcttctgctcccacgtcacaagaacctgcatatacattatattcattaattcagccttccaggaaggtgagcctcttcccgtggtggtggtggggtgttgttgaygtagatgtgtattttgcatgtgtttgcagtgagagtgtgtgtgcacatcctggcaagttgttctttrttgtgtgtatctgagtrgcttctgttaaatkactgtatttaaatgtcaatgggccaatgagaaatgccttactggttctgtctggagaaaaataacagcttctagactaagagaacagtagactagatgagtttttgggagtttctgtgggaggtaaaggacagtcagagacagaaaggaggtgctttgcacagagagactacggggtacttagtaggtcagctgaggctatggtgagagatactggaggggtttgcaaggcagggcatattgcctggagctggaggagtagactggatctagagagacacaatcttgaccttcagagaccagagaaaggtcctggccagtcagtcacctgctggtggaggcctctggactgaggcaacccatccttttgcactgaaatccttctccaagctgagttcgtagctctcttgtgtacttggaaacagagttgggtatcctggtacacatggtcattgtttttctcttgtatggaaggggatgggaagagtggtgttcccaaggctggagccacagtgtgaagccagaaagccttaacatggtagtatgggaatttgggagtccacacaactgtggaagtccatgcaggtcagggaccacaggtttgaaggggtttaggacagattttcagacttttcattcaacctccttccaataagccattcaacctacttggatcccatcgtgagagagatttgtttttaattatatgctacaatataaggccatatagatgttcacaggcaccatgttcacctgctttggtgtatgtaaactctatatgctactgaatgtgcctctgaattctagtgtccttgggttggcaattatttatatgcctggattgtttacattaagggtgtgtgtatgcatgcgttgaagagatacatggtttggggcagtatttgcattaggattgcctgagggatatgtgtgtatgtgtatgtgtatgtgtgtgtgctctgggaatgtgtgtgtgtatatatatacacaaatatgtatatatgtgtgtgtatatatatatatatatatatacacacacacacacacatatgtgtatgggttttaggtgtatgtgggtatggaacagcaaattctgattttggttcagaaatatcatattataggcaaatactgtatatattgtgtcttccctggagaccataaacaccattgttttgctcctagggtgacagattctattcattttctggctgagagtgcctcagaatttttctgggccctgagtctcttttgggacctctcacatcacttaggagtgggagagcacttatctcgaagttaagtattctttaccttctgaatttctagtctggatccaggaagaggaaccacagcccttccttcaatagcactatctatgaagtggtaagattctggaactcctcaatgggtttactgtctgttgcatagccctgaaatctagccatgaaagggtacacttaggaaaagatcattcacacagtctcagagttgtagggaatttagagatcttytaatgcaagtctttgttttagagatgaagacactgaagcccaaggagagtgagggtctgacccaagatcatattgcgtgtttagatatgatacttactgggcagcttgggttttaaattagggccgtccccgagctagttcccaggctgtgggccacaaactggacatctctcctttccaagagtgttcggaggaggggtcagagaggggaagataaaggactctaaatgattttctaaaattagcaagtctttgggagccattccaggacataggtgagcttaatcttcttcaggggtcaacactgttcagagatgaccactgagcctggtggttgaattgattcccatcagagcatttagggactggaaaggagggactcaacatttcttgggggtttattatggataaggtagcctgccagtgtcttcacatggattattttatttagtcctcacagaatgctacaagataggtataattatactttccatttatactcagagaaattaaggcatggagagcatcccccaacctcccccactacccattagcctcatactacacctgagcctccccacctgtggtccaataaagatgctgccattggtcagaagggagggatgggtggctgcctgctggaattcctggcacttcagctatcacccaacattaargccaactggacawcccagggtcatagagggcactgtgtagacccaggtagcttgtgaggtcatgaaaaagcatatgtggttaagagagtacyggaattggagccagaagaactagattcaagtccctcctgcrcttcacactagtcgtggatcctgagtaatttgttttgtcactctgagcttcattttttaaatctgtaaaatggggatggcaagtcatacctcacaggattgtgataaggacctcccagtgcaagggtctgaagtttctccttttcttttgcagattggaaagagtcaacctaaagcccagaaccctgctcgattgagccgcaaagagctggagaactttgatgtttattcctagttgctgcagcaattctcacctttcttgcacatcagcatctgctttgggaattggcacagtggatgacggcacaggagtctctatagaacasttcctagtctggagaggatatggaaatttgttcttgttctatattttgttttgaaaatgatgtctaacaaccatgataagagcaaggctgttaaataatatcttccaatttacagatcagacatgaatgggtggaggggttaggttgttcacaaaaggccacattccaagtatttgtaatctagaaagtgttatgtaagtgatgttattagcatcgagattccctccacctgattttcaagctgtcacttgtttccttttctcccctctctgggttgactgcatttctagactctcgccggcccaggcccatcttccaaagcaagaggaaggaatgataatggtgactcaggggaagaagaaacagccctcctctgaaagcctggactgtccggctgtgaactggctggcaggttctgcacgtgggtgggggccagggcctgggctttactcaattgcagagaaaaaactttctccctgcatctcayacctttacctctggccagttggccaccagggggagtgggctgaagggagagtagatggtgcaaagcaagcccatctctragtagaaaaatcacccagagcacatgctgacctgataactggggtgttgagaccagctttgtccatggtatgatgtttgatttatgaagacgcattgttagaaatccatttggcttcttcatagaagtggcttcccagaggaagaggcctctcagaaaccatgttctatttaagttctgagtcctgatgagtgttccccaggatgcacattgaagggagggctcaggcagctgagggctgagaatgaggcagttggaatctagacactatgctgggttccctgagtcgtcaggccagacatttcaacaaggctgtggggagcagggctgtgactctggctgagcccaggaaagcgacaagggtgaactgggagaggacttactcagagaccccaacaggtgatactgcacaaagcctggttcttcaattttcctaccctgtatctaacataggagtttcatataaaacggtgatatcatgcagatgcagtctgaattccttgcctgaattaaatttatgtatcctctccataccctgcatttttattctctatagcagccgaagggcacttgtgggccatcaacaaacacatgtctgtttgaacactgctgtagagggtctgacttcctggtgagctggcagtgtccttcagccctgttcacactgggacagcagagaactagacactaggggctattccatcttgtgaaggagagccaaggcactcacttggtcacatcctgcaggatccctttcccctgagactgtgctgctggccaggctggtttcctcctggagagaagtgtgaacagaccacatcttaaagcaagtgagaagcttaaaaaccaggcaaatatattcagaaagagcctgggggtccaaggcaggtactgggagttgagttgcagagtcaaggagtttagtgagtagaggcagcaggaaatgacggggttcagaaacagtccagatgaacaccagggactctgaccattgactgctgctggcctttcatgtgtcctgcatagatcttgaactggccagatttatttaaggagcagaagagaccctatggggtcagggcttttgaggatgctgtattctagaaagaaagatgtacaacgtcatcatgttatgtgtctgattgttgagcttccgtgacaatgcctcacaaagataattatccatgcaacaagccagtcaatgaacaagcagtaattaagctcctgctgtgtatgaagcactgcctgaactcctgggagtacccactgcaggtgacagaagccatactgagttcaggatcatgtgcaggagagcatgacagaggcagcacacaattaaaggacctagatgggctgcaaggtgatggtaacagaaatgtacactagagtatcacgaatataagtcaagtatagtgcatcttacaggcagaggagagggctgtggccacagtcttagggagagatactgtgggtattctgtgtccagactggacaataagaagggaagttcttttgggtaaatatgggaggcttatttgaaacaggcattttaagcacctttacaaaatagcaaagaagtaatacacacatatggttttaaaaaaatccagcagtacaaaaaattgtgcagtaaaaaatgtctctttcccaacttgagattcccagttcctccccagaggcagccactaatgttttttgtatttctttccatagcttttctatgcctatgtaagcatgtagacttacattttttcttttcttttctttttctttctttcttttctttctttctttctttctttctttctttctttctttctttctttctttctttctttctttccttccttccttcctttctttctttcctttcctttctttcctttctctctttctttctctctttcttctttctttcttcttttttttttcttgagatgaactctcgctgtgttgctaagggtggaatgcagtggcgcaatctctgctcactgcaacttccgcctcctgggttcgagtgattctcctgcctcagcctcccaagtagccgagattacaggcacacaccaccatgcccagctaattgtttttttgtatttttattagagacggggtttcactatgttgaccaggctggtcttgaactcctgacctcaagtgatctgcccaccttggcctcccaaagtgctggggttacaggcatgagccaccgtgcctggccaacatacatttttttttttaaatccaactggtagcatacaatgcacgtggtcctgaactttgttttttccactccataatgtatcttagagcccattccatattagcacctattagtccttgcttgcttcccaagcggcagggtttgccgttgcatgggtatataatcatatatgtaactggattctcactgaatgaatggacatttaggttatttcctgccttttattttaaataacactgcagtgagcatgatattatgtacatcttgtgtcatgtgtgacaattctcttgggttcttttcagcagtgttgagaaggtggtgtaaaggacagctggtccaggcccctcagcaacatttgaccagtcttggtagaatttcgaggaggaaacgctataagtgtgcgaggtgacaaatggggcaaagacatctgaagcccataggctccaagaaggagcctgtgtctgaactattaatgggtttgggagtccttaagggtgagaaggagggggaggggccacatccaggcatctctgaggcactgaaggaaattctgaggtgcttctgtctgcgagccccaggccccatgaggtccagctgactttccaaccccacggtcccaggagagaggcagcagctgcttttcctttcaggtgaaattttcataggtaggactttcaggaatctcaagatcattctgttgtggtggtggcaccacctgtgagccaaaaatccacaaaacaatatggttaataaagccttggaagagtgaggctgatgaaagaggaaggcaaggccaggctatgactggtccatcctacagaagtagagtcatatgtgctggcccagggatggcgcaatcaaccagcctgatgccaagcatttatggaggctcctaataggaaaggctgtgggctggactctctgcaaggccaacacaagacagtttagtgcagcaaatccaggggataaaaaaatgacaatgaaggggcttgccctcacgaagctactgtcaaatgattccaatctctgccctagctggagaaacaaaacgaacatttataagaagataatttagatggcagaggttaagttccaaagtaatggtccagaccattagtccccaagctgttcccaagggttcttaggcttccctgtctgagagtgttcagggaaggctctaaagagcagataagctctgtgctgacccagaggagcgggaggttgggtaccagcaacagcttggggatagcataaacctttgagatgttgtacagagaggtatatcagaaataagaactaaagtaggtttgagaatttccagatcaagtaggcaataatggccttcagagatccaaaaccagaattcctggtcctgacaattctgaagacaaaagatatagttgtcaagagtttggctcaggaaatgcaatgatttcaacttacactgtaagtgaggtggtttcaggggtctcagtctccagggtagtgtgtgtgccttgcaggactgaccagacatgtggtggtcattctgaaactcagagcagggactgactttaagtttgaccggtattgacccaaacacaaagggccaggccagagtagaaagcagctctgggaatgcagtgaacagcacagatttggccttaggttccaaggcaaagtctctagctggctaagcattagactactgtctagaagtcaggatgagatggatgatggttgaaccaaaccacacatcccaacaagtgtttactgagcaaattctatccatcttttaaggcccaacccaaattcctttttcatgatgtgtttcctctttaccacagtgcagtgatatcccccaccttcagcttctgaaaaacccttaggaactgtgcatacaatttattaagtagtcaagtaactttaacccatttacgcaggaggttgcaattttttgaatttgtgcatgagtgaaaaatcagaccctggtgatgatcttgagcagtagaatataaataactcctacacgcttagtgttccaataatggaacaccaggcataagtgcaacatatgtttgaactgcatggccacttatatgcagattttttttcaataaacatcacactgagtgtgcctgcctctcctgcctccccttttacctcctctacctcttttacctctaccactcttgaaagaacaagaccaacccttcctcttcctcctcagcctactcaatgtgaaggtgaggatgaagacctttacaatgatccaattccacttaatgaatagtatacatattttatcttccttatgattttcttaataatttcttttctctagcttactttattgtaagaatacagtatataatacacgtaacatgcaaaatatgtgttaatcaaatgtttatgtttttggtaaggcttctggtcaacagtaggctgttagtagttaagttctggagagtcaaagttatagaatgatttttgattgcatggagtggggtggggttggcactcctaaacccctgaattgttcaagggtcaactgtagtcttttcttttttttttgagatggagttttgctcttgttgcccaggctggagtgcaatggtgtgatctctgctcaccgcaacctccacctcctgggttcaagcaattctcctgcctcagcctcctgagtagctgggattacaggtgcctgccaccacattcaggtaattttaatatttttagtagagatggggttttaccatgttggccaggctggtcttgaactcctgacctcaggtgatccacctgcctcggcctcccaaagtgctgggattacaggcatgagccaccacgcccagccgagagttttttaaaaaatatttttttgaatatgttatagggagggaatttgggggagatttgaaagcaaaagtatgaatggacacgatgttttcaggaaagtgaaaatgaaatggacagccagatcaaggtgaattatttaagattactcaggatgatcttaaaacgcctcatggttcttaatactggaacttccaagtactatctttgtcaccttaggcaaaattaacttccttgaatctgtttctttggctataaaatgtggatgacaacacttttctagaagtattacaaagatcaaagaagaatgtgtatcaaggtattgtaactgcaaaacttcatataaaagcaagtcagttattattatcattatgattatttaatgataaattctacctgtaagggatttttttttttttttaagacatggtctcactctgtcacccaggctagatttcagtggcatgatcttggctcactgcagccttgaactccccggctcaagcggtcctcccacttaagtgtcctaagtagctgggactacaggtgtgtaccaccacaggcctgggtaattttttttgaactttttataaagacagggtttcaccatgttgcccaggctgggaattttttttttttttttttttttgagatggagtcttgttctgttgcccaggctggagtgcagtggcacgaacttggctcactgtaagctctgcctcctgggttcacgccattctcctgcctcagtctctgagtagttggaactacaggcgcctgccaccacgcctggctaatttttttgtatttttagtagagacggagtttcaccgtgttagccaggatggtctccatctcctgactttgtgatccacccgccttggcctcccaaagtgctgggattacaggtatgagccaccgcgcccggctgggatttttttaaacactagaataaaactaatgtactgtaggtggtggtgtattttccaaaaattcttgttgttaaattgttagctaattttcaatggttttgagaagttgtcatttaggtagattaggattagggttagagatagatttaaaaagctataaagaccctaccttgtttgagtgtataagctgtcattcaggtcagtgttaaaaataaccaacataagatattattaaatcaattagaaatgttcagcctttggtcacacagatgtcaggaatatttgtttatgcatctctgttgaccatggaatgtatctgaggggtgcatagtgggtagaatttaagatccttagccatgggaatctcggattttcagttcaaagggtctaaggaatagttcctcactctgtgggccttgggatacagagaatgtagttctcaccacctgaggtttccgtatggagcagtagattgtggctgagctctcttccttctgagaaactggggtctttccct

SEQ ID NO: 97638 - DNA, 51853 bp, Homo sapiens
gactaaccctaagaagcagatgctcttattattcccattttatagacaaagaatctgaggttcaaagaggataaataatttgaccaaggccatacaactagttaagtagctacaacctattgggtcttaaagcccttgatcttaaccccaaatgaaacagtccaggtaaatgactctggtgggtgtttgatacggaggagtgggcagagaggagaggaagtagtgagagatgaaagtaccttctctaacatatgcctaaaaagtctagagcagcactgtccaatagagctttctataacacaacagatgctcccttacccaagggggatacattcaaagacccccagagatgcctaaaaccacggatagcaccaaatcctatatacctctaactaagacagctactcaattacgaatgggcaggtggcacatacagtgtggaaacactggacaaaggatgattcacatcccaggcaggtaagagcgggacagcgcaagacttcatcatgtgactcaggatgttacacaatttaaaacttacaaattgcttatttctggaattttccatttaatattctcagactgcattgactgtgggtaagtgaaaccatggctaaagagggattcctgtacatgtatagaatacataatatttatataatctataatagagaattaatgtatctattcaaccctggtatacatgtaggtatacatggacttcaggatccatcttttcttgatcctccaggaccttgatccaccaaatcccagctctttctgaacagatctacttgccctatgggatgtaatttccagtggagctgctctacttcactaagtactcaggaaattaggcttcttccagctcatggtccaagatggctgctccagttctagccattacatctacattccagacagcaggaaagagtaagagaaaggaagcttccctcctctagaacacattctggaattatatatattacttttgcttacaacccataggtcaatatttagccacaggccacaacaagttgagggaagcttgggaaattagtttttatttagaatggtcatgtgcccagctcagagtccagattctgttactgaaaagaaaaggagagcagatcttgaaggagagtgggtacagtagtctgggaaagttcttatttgtttgtattttgtttgtttgtttttttccttcccagcctcaataatgagaggcaggcaaggagaaggttggaaatgattgctggttgtgctcttccgaccttttgtttgcaactggatccttcttctgggcccacaagtctcaccatccaaaataataacaatttacacagtacctctctctccttgccagccattgttctttctttccttacatggccaagtctctgtaaagaatagactacacatgttatccgcattttctaactcatgcttcagttctctctggcttctttccctcccactccattgaaaacattttaattctaggccactactaacctcctaatttgcaaatccaacagttgcttcttcgtcctcttcttccctgacctctctgtggcttttggctttccttaccacttctgcctctatgaaaccctctttgcctgtggcttctttgacatcaccctcacccagttcccttttaacttctctggctacctattctctatttccttcatgagtgcctcctcttgtctttaccccatcaatgctggcttcttcagggtgctattttccatccctcttctccaaactctcctcctaggttgttgtttccaaactacattcttgaagtttcagagattgaaggtactttactgtgaaatggggacctattttagatgcctccctcaaggacagattactcaaaactgctctactaaaacatctttcccattggattatgtactttgtcatagattgaattgtatctcccccaaaagacatgctgaagccttaacccgctgtacctatgaatatgactttatttggatatgggatccttgctgatataatcaagttaagatgagatcacaggatgagccctaatccaatataactagtgaatttataataagaggagaagaggctgggcgcagtggctcacatctgtaatcccagcactttgggaggctgatgcaggaggattgcttgagctcaggagttcaagaccagcatgggaaacatggtaaaacctcatctctagaaaaaatttaaaaactagccaggcatggtagtgcacacctataatctcagctactccaaaagctgaggtgggaggatcacttaagcctgggaggtggaggctgcagcaagctgagatcgcaccattgcactccaacctggatgacagagccagaccttgtctcaaaaagaaaaaaaaaaaagaagagacagacacacagggagaacaccacgtgatgatgtgatggagtcagagactggagtgattcattgacaagtcaagggctgccatggattgacagctgccaccagaagctagaaagaggcatggaagcattctttcctacaggttttgcagggatcacagccctactgacactttgatttcagacttatatatccttcagaactgtgaaacaaaacattcctattgtttcacagcagccctaggaaactagtacacatttcctcatcaccctgcagctccctatctaagccaccagttatagcttgcaatctcttttgtcttaaaaatattttgccttaatttttctcctagttcaagggtacttgggctttcaaatatcatagactagtttttttaaatttgaagttcaacattagggttggaacgtttgattttttcctttaaccttgtgctataagggcattagaaaaaaactaccatctaggcacaaaactctcagaacaaagtacagttctttaaattaaacactttgggttttatgaaaaactcactgctttattccaactcttccagttttatttcaaatccataaaaactttattatggcaacatttaagagcctcctatgttatgtatgtgacatagaaaaatattaatagataaatattcataacctcttttctgttcgcagacatcttatttctccctccctttccaaattctctttggacatattatgaaattgggctggccaggcgcagtggttcatgcctgtaaccccagaaccttaggagaccaaggtgggcagatcacctgaggttgggagttcaagactagcctgaccaacatggagaaacctcatccctactaaaaatacagaattagccaggcgtggtggtgcatgcctgtaatcccagctactcaggaggctgaggcaggagaattgcttgaacctaggaggtggaggttgcagtgagccaatatcggcgccattacaccccagcctgggcaacaagagcaaaactccatctcaaaaaaaaaaaaaaaaatgggttaatactcagtgagagggagaatttaagaagcagaagctaaaaaaaatagtgagaattccttttggggtttttgtttgtttgtttgttttttagactgagttttgttcttgttgcccaggctggagtgcaatggcaccatcttggctcactgcaacctctgcctcccaggttcaagtgattctcctacctcagcctcccaagtagctgggattacaggcatgcaccaccacgcccggctaatttttgtatttttggtagagatgggtttcaccatgttggccaggctggtctcgaactcctgacctcaggtaatctgccctcctcggcctctcaaagtgctgggattacaggtgtgagccaccgcacccgtcctgagaattcctttttaaaacatagagagttatctctcaaaaaaagcttagatagatgagaaggtggagaagcatgctgaggtttaagggagttgggtgaatgaggcatataagagaaattgaaaatggtaaaataagaggaaaaaagagttttaggaaatttactatacagtgtctgtgttctcctttgagtacctcttgagaatctgaggtagggatttaaattgctttcaattttttcttccactggacttgtatctcttatttatctctctttaataaaaatagagatgggatctcaccatcttgaccgagctggtctcaaactcctgggatcagtggatccttctgtctcagcctccaaaagtgctgggattacaggtgtgagtcaccatgcccagtcctttttcaattaaaattttaaaaaataacttgtattgtggatatttaagatatacaatatgaagttgatatcatatagaccaggggtccccagtccccagcaaccagtcctcggcctgttcggaacccccatgaccttcctgagctctgcctcctgtcagatcaaccgcgcattagattctcataggagctcgaaccctactgtgaactgcccataggagggatctaaattgtgtactccctatgagaatcttatgcctgatgatctgaggtggaacagtttcatgccaaaaccatagcccccatccccttgccaagtccataccacccactcccctgccaagtccgtggaaaaattgtcttccatgaaaccggtccctagtgccaaaaaggttggggacagctgaaacaggcagtcacaaggttactatagtgaagcatattaacatatccatcatctcatatagttaccaccaaccctttttgtgtctctgtggcaagagtggctaaaatctactcatttggcatgaatcccatatgcagtgcagttttattcctaatggacttgtgtgattatgtgtaggaccaaatcacagggcagctaggccttattaagtgttgcattggctgggtgcggtggctcatgcctgtagttccagcactttgggaggccaaggcaggaggatcactggagcccaggagctcgagcttgcagtgagctctgatcgcgccactgcattccggcaacagagccagaccctatctaaaataaataaataaaaataaagagttgcgtatgactgctaccagaggcagtatggtataatggttggatatgactgctatcagaggcagtatggtatatgatataagggcttgggggttctggaatcagaagccctgtgttggaatcctggccccagtcttttttttcaacacctctcctttgtgtccatcagaaaattaccttactgcactgtgcctcatttccccgtccatgaaagggagataacaggagccaccacactggattgctggatggattacatgagttaatacacatgaggcacttagggcatgccaggctgtggacagccctcacttgttagctagcaatgaaacagaaacctagaaaaccatctctcctctgcttaagccaaacaaaccaaaaatacctcttgtggctcacggttcccaagcttcctggcatggctccgcacaaagctgccttcggttcgcccggcaggctttgtagcgaccttccctgcccgggtcccagtcacggtcgggagcagccgccgtggcccgggctcgcgaggcaggctcccgcccgcaccctcccgtgcgaggtccccgccctgcgctcccagctcttcgaacctctacccgagcttctctcacgttgcttgtgagactgcctcgcccacacatcctagatgctcaattaaagtggacgtaaaggaagatgctgtggcttcttcccaaaataccgaacgggaggctctgggtggggatgggagacgtggtcagtgggaagcgtccttccaccctaaggtgcgttgctccgggtggccgctggccaagtcgcctggggtgggggcggggctcccctgtcaggaccccccttccccagcgtctctccactgcccgcgggcctccagcctggccgccggcgcccgcggccacgtgaccccagcacagctggaggcgggtccccgccctccccagggagcagccggttgaggcgggagcggtgcattgtgggcasaggggcgggggttgggaaratggcggctcccagcctcctcaactggaggcgagtttcttccttcacggggccggtcccccgcgcccggcacggacaccgagcggtggccatccgggagctgatgatcatctttggagggggaaatgagggcatckcggatgagctgcacgtctacaacacrggtaggcgcggcggcggctcgtcggccccscctgctggagctgcggagggggaggggaggcgaggcggcggccgcggccctgacagctgtcaccgcccggtcactgcttccttgggcgggcggcggggagcgcggctcagccgggcagcccgggtccggcagctctgtcccggaccgcagctcaggatctccggggcccttggggcgcaacggaccccgagcggggcgcaccggccttcaggcgggggatcccggacgcccccaccccagcccgacaggcggacgcaggcgacagaagaccatgtccaaccgcctgggccactccccgaaatctcgcctctgtcaaaaaacaaaacccactccaaaccaaagttccttagggcctttcccgtctttgcctgccttccttccttaggaggaagaccatctagggggtgaggagggaaaacgagaggccttctggcactctcgcctcaaatacaacccggtgtttggcaggtaacggtcaagagcccctccgtgagccgcgctctaaagcggcggggacgtggtgaggcggccttgtgtctgcatactcggtgtggacgyccttctggactggccctcggaaagaggactgtcataacttgagcaccactgcagatcacaagtgcccctgggcagggagcccctatctttgaggacctctgtggaatagaaaggaaactggatttaatttttttttccccttgtaaatgctcaggctgtcacaagaaatctgtttggtgtaaagacagtgatggaattttgggtctacttcatgaccgataacttttctttgatcaaacaacttaatcacaggaataatttgaaggttaacaaaatagtggagtctgagaagttttatttttttcaccctctcctcctcccagcgccccagcatatgaaggtaaaaagttactgacactttggtcttagtgtaaaatccctggctttggaacaaattagacctgatttgaatcttgctctgccggttgcccaggatcagcgctaaagttaccaaacctttttaagcctcacaattttcagttgtaaaatagagatttttatactcacccagcagggcrttttgtaagaattaaatgatacagatcagggtttttcaacagcagcactctcgaccttttgggccaggtaattctttgttgaggttgggggaagctgccctgtattgccctgtacattgtaagatgtttggcagcatccctgcctctacctactagatgccagtaacagccccctccagttgtgacaactaaaaatgtcaccagrcattaccaaatgtcttctggggggcagaatcatccccagttgagacccactgatattgatgatatatatttgctgatagtatatgataaccgtkgtttgttataatcggttttcattttattttggcaactagctacgaatcagtggtttctgccagctgttagaggagatatccctccaggctgtgctgcccatggatttgtctgtgatggtaccagaatattagtatttgggggaatggttgaatatggaagatacagcaatgagttatatgagttacaagtaagtgtatttaatattgtttcattctgaggctttaataatgatattgttcataatttttcaaaagattgcaacattactaacattgtttaacacattttaatattattcaagtaatgtattattcaagtaaastattattcaagtaatattattcaagtaatgtaaacttcacattttatagctttatagaaaatgtttccacttcacttaaaacccaaagtttcctggcaagtctttttcccatacccagtgcaacatttataacatcaagatatctgttacgtagcatcagttgtacatgttatatatttaggtttttgtatcttaatgcagtagaaactttagcctgcaacaggagcgcctggagaacctgtgaaaacacagattgctgggtcctacccagagagtttctgagtcagaggaaggccatgagcatttgcatttctaccaggttcccagctgctgatgctcctggtttgtttgtttagagacagagtcttgctctgtcacccaggctggactgcagccgcgcaatctcggctcactgcaacctccgtctcctgggttcaagcaattctcctgcctcagcctcctgagtagctgtgactacaggcacgcgccaccatgcccagctaatttttgtatttttagtagagacgggttttcaccatgttggccaggctggtcttgaactcctgacctcaggtgatccacccacctgggcctcccaaagtgctgggattagccgacgtgagccaccgtgctgtgccgcaaattcttaagtattaagtactgcaggactcacagagggatagttggcattggtatcaactgacakattcacaactttgaataaaactttccacatttggaaaatcaccatgcctggcccctaggctatactttgaaaaccactgctttagtgttttagaaattgttaccctcatactaatatttactacaccccccaccttgacaatacatacaaaagaggagtaacagtttcccataacctttctaaatttgagtcttattaaaccagactcatagcccttgttgacttttcttcctgatctgtgccttatccctagggcggtgatcatgcgggtatctgctaattggcagatgtgagtggttatacctatttacaagcaactcattgcaaaaataattttagctaaagaaaacatccatggccagagaataagttttggaatttgatatgttaaatgagctttatgtttacctttaaaaggttaaaatatttaccattcatggattaccttttttcagaaagtaagaatatataaattacatttaatcttgaagctatgtataatactttatttttcatttggaaactactttagaacagttagtgtttattattatatgctgagtttgccatggaaatctgtgaatatggaagagtaacttgaatgtctactggaacatatattttaattccagaagttagctggttatttgtcatttgtyccaaaagtagttttttagtgccttctgatgggatttagattaaaatgtattgatatgatgttgcactattgacaatataggagtgctttcttgattttgtctgactgtatttgtgccctttttttttttaggcaagtcgttggttatggaaaaaagtgaaaccccatccccctccttctggtttacctccttgtcctcggcttggacatagcttctctttatatggtaacaaatgctatttgtttggtggcctggcaaacgaaagcgaagattcaaacaataatgttcccaggtatgctgactctttcagaccaaatgcttattttatgatttagagtaggaayattttattttttccatctttaatttttaaaagggatgatgcttagctttttgcatttcaacctaacagtggacagatttgtgtgtgtttgtgttttccttagtacctggagcatacttgttttcaaaactgtgtcttttcttcagaaagcattggagctaaaaacaaaaaaactgtgtctttctaatgagaaatcatcttattaaattaatattaatgtaactgcttgtatcaatatatttgtatatattgagccataatgcattttagctgcctcataaatgataatgaaaagtaacagatggttattttaaaattagatttctctgggaatttggcgacaaaactctgactataaaatgaaagctatcatttccatgttttatacaggaagctattagagtagttcacgctagcatatacttttacaatcaattmtttcctcctttttcccaaacagaattaattcactacctcttttcttttcacatcatgttttgtttgtttgtttgtatgttgagttccaataagcctttatgaagcagctcataggcaggtttggtccacagggtgtagtttgctggcacagattgtaaataatggggctatctacattgttgacccctattatagctaatgttggttttgtctgcaaagaattcctctttcctttggggaactatactgttccatgtagtttttttttttaataaattttatttgtgtaaatttaaggtatataacatgatggtataagatagatattttgtatatatattaaaatggttactatagtggtaatatatccgtcatttcatatagttacccatttttttctgcctggggcatgagcagctgtagtcaccaccaggcgttgtggctcatgcctataatcccagcactttgggaagccgaggtgggtggatcgcttgagcccagcagttcaagatcagcctgggcaacatggcaaaaccccatctctaccaaaaatacaaaaaattagctgggcatggtggcacgcgcctgtggtcacagctactcaraggctgaggtgagaggatttcttgagcctgggaggtggaggttgcagtgagccgagatcgtgctgctgcactccagcctgggtgacagagttagaccttatcttaaaaaaacaaacaaacaaacaaacaaaaatcctgaatacaatgcattattattaactgtagtcctcatgttgtacattagatctctcaatttgtttatcctaggtatttgctactttgtatcttttgacctacatttccccatttccttcccttcctgtcactctgaccctggtaaccactgttttattctctatttctatatgttttaccttttttgttaaaaaaaaaaaaaaagatttcacatatgagatcatgcaatattgttctttgtgtctgtcttatttcgcttaccataatgtcctgctgctccatccatgctgtggcaaatggtagtatatttttttctttcttttttttagactttctctttttttatttttttatttttattttactttaagttctggagtgcatgtgcagaatgtgcaggtttgttacataggtatacatgtgccatggtggtttgctgcacctatcaacccatcatctaggttttaagccccgcatgcattaggtatttgtcctaatgctctccctccccttgccctgcaacccccgatatgccctggtgtgtgatgttcccttccctctgtccatgttttctcattgttcagctccctcttatgagtgagaacatgcagtgtttggttttctgtttctgtgttagtttgctgagaatgatggtttccagcttcatccatgtccctgcaaaggacatgaactcttttttttttgagacagaatctcgctctgtctcccaggctgaagtgcagtggcgcaatcccggctcactgcaagctccgcctcctgggttcacgccattctcctgcctcagccacccgagtagctgggactacaggcgcccaccaccacgccctgctaattttttgtatttttaatagagactaacatggggtttcaccgcgttagccaggatggtctcgatctcctgacctcgtgatctgcccaccttggcctcccaaagtgctgggattacaggcgtgagccactgcgcccggccaaatttattcttttttatggctgcaatatttttttctttttaagcccgaataatattcacatagtgttttgatcacattgtcattctagcactcaagctttggagatttagagtccaaagggctgttttctgattcaggtcttatcatgtgtgtcctttagagcaaataatctaagcctgtttccttcactgtgaaatgggagtgattaaatacctgttttacagtgtcattgtgatagtgaaataagatcattggtataattttcaaagcactttcaggttgccatagcatataatacagtagagttatcaaccattatgatgtctttttacctgcattagattgatggtaggatcttaactttttttccaaacttttttaaaatatagaaatactaaaatatcatggaaaatgtggaaactacagaaaaggaaaaaaaattatcccaccacagtaatccggatactttttactttttttttttttttttttttgagacggagtctcactctgtcgcccaggctggagtatagtggcgcgatctcagctcactgcaagctccgcctcccgggttcacgccattctcctgcctcagcctcccgagtagctgggactacaggcgtctgccaccatgcctggctaatttttttgtgttttttagtagagacgaggtttcaccgtgttagccaggatggtcttgatctcctgacctcatcatccgcctgcctcagcctaccaaagtgctgggattacaggcttgagccaccacgcccggccaatacttttactttcaacacatgtcttttaaaaaactttttccattaaacagatttttaaaataacactggtaaaaagtcaaatcagaaagtgtacagtattctttcaacagcactatcccccaacataggcaaatacacataattcagtttgatgtacatcttttggaacctttttcatgtaacacttttcatgtaccctttttcatgtattagcttttgttaggttattgtttataatggggcaagcttctcaagggtattctacttcagagggccagtaggtgcatgcggttacatacaatgctttttaaagcctatgtttaaagcacacattcatttctggtcacattccattggtcaaaccagccatatggccaaggccagagtcagtggtctaaggatatatactgtgcctacggggaaagaagagttgggaacacattaatacgatcctccacacagacctaactattttattttattttattttatttttttgagaaagggtctcactctgttatccaggctggagtgcaatggcacaatgtcagctcactggagcctccacctcccaggcacaagtgatcctcccacctcaacctgtttaacttcttaagaaattctaccaaattgttttccaaactgactacactattttacattcccaccagcaatatataagggttttactttctccaccttggctaatattcattattgtctgtcttttttattgtcgccatcctagcgggagtaaagtagtatctcattgtggttttaatttgcatttctctaatgactaatagtgttggacatcttttcatgggctttttagccattcatatatctttggtgaaatttctattcaaatattgtgcccgttttgaaattgatagttttcttattattgagttgtaacaattctttatatattctggatatgttttatgttttattttattttttaatcagaaatgtgatttggccaggcatagtggctcacgcccataatcccagtactttgggaggctgaggccagcagatcacttgacccagaagtatgagaccagcctgggcaacatggcaagaccctgtctctgcaaaacattagaaaattagccgggtgtagtggtatgtgcctgtggtcccatctacatggggggccagagcaggaggattgcttgagcacaggaggccaggactacagtgagccatgtttacatcagtgcattccagccagggcaacagaacaagactgtttaaaaaaaaaaaaaaaaagtaaaatttgtacaaaaaggcttactgggattttgatagggatttcactgattatatatcagtttgaggagaatcaccatcttaataatattgggtctgccaattcatgaacatgggatgtttctccatttatttaaatcttttaaattttctctcagcaatattttgtagttttcaatgtatgtgttgctctttctaattttggtaaatgtattcctaagttttttattctttttgaggatattatgaatccatttggtttcttttttttttttgagatggagtctcgctctgtcgcccaggctggagtgcagkggcgcaatctcagctcactgcaagctccgcctcctgggttcacgccattctcctgcctcagcctcccgagtagctgggactacaggcgcccgccaccatgcccagctaattttttttgtatttttagtagagactgggtttcaccatgttagccaggatggtctcgatctcctgacctcgtgatccgcccacctcagcctcccaaagtgctgggattacaggtgtgagccaccgcacccggccgatttggtttcttaatttcatttctggattgttcattgctagtatatagaaacacaaccttggttttgttatttatcttgtatcctgtgaccttgttgaattcatttattatttctaatatttaaatggatttcaatttttttattattgttgattcttaggagttctttacatatatatatttttatatgttccaaatatgttttctaagtcttctgtttgcctttttttttttttttgagayggagtctagctgcatcgccgaggctggagtgcagtggagcgatctcggctcactgcagcctccacctcatgggttcaagcgattctcctgcctcagcctcccargtagctgggattacaggctcccaccaccatgcctagctaatttttgtatttttagtagaggcagggtttcactttgttggccaggctggtctcgaactcctgacctcatgatccgcccgcctcagcctcccaaagtgctgggattacaagcataagccaccatgcccagcccgctttgccttttttaaaaagggttttctgtttagtttcatcatgtttgacaatattttcttctatggctttctggttttgaatcttgctttgaaagactctccttcaggaaaattataaaaataaattttctatattttcttctagttcattcaaacttttgtttctgtttagaacattaatgcatttgtgatatacttttgtgactagtgtaaggctttttacttcttttcctagttgattttcaattttcccaacacyatttattaaataagccatgttttctattggtttgaaattccatctctgtcatatcttaattcttgtataaatgtgtctctctaggctttctataccaggggttgcaaactatatcctgtgggccaaatgtggcctgctgtctttttttattaataaagttttattggaacacagccatccccattcattttgtgttgctgttggtagctttcatgttgaaacagcacagttgagtagttgcaatagattttatggcctatgaagcctaaaatatttactatcggaccctttacaggaaacatttgttgattcctgctctagactctattctgtttcattaatatatttacctttctatcattaattgtggcatttgctataggttgttggtatgtgattttaataacattaaggacgttttcttttctttttgagacagagcctcactctgtcacctggggctggagtacagtggcatgatcacagctctctgcaccctcgacctcctaggctcagacagtccccctgcctcagcctcttgagtagccagctgggaccacaggtgtatgccaccatgcccagctaattttaaaactttttttttctttttctttttcatagagacaaggtctttccgtgttgcccaggctggtcttgaactcttgggctcaagtgatcctcccaccttggcctcccaaagtgttgggattacaggcgtgagccgccatgcctggccaaaatgttcttaaatttccagcttactagttttatttttctctcttttgaaaaagaaatgtatattgaggtagtttaaattcattttggagcttactgtgtctctcctttaatccatgaattttgtgaattattttaattaattaattgaggttctgaaatatgagccacctttttattcctagttaaatctcactttactgtgttacagaattcttttctttgctgaatcacatttctaacatttatttataatacctatatttattagcgattttgcctgtattgtctttatatgggggagtagggtgctattgtaatctgatttgagtatcaggattatgttatccttgaaaatgtaatcagggttatgttctgaggtcatggaaagccctccatcttttattatatttaaataacttaattccttgaatatttagaagaaattttccatatttacctgggattggtatatgatcttttattgccttttcaatttyttctataagtattgatctatttaggttttcaacctttcataatttttagtaattttttttgagaagttacccatttatctagatttttaaatttatttytaaaagttataagacagccaggtgtggtggtacgcmcctatagtcccagctgcttgggagtytgaggcaggaggatcatytgaacccaggagtttaaatctagcctgggcaatataatgagcccctgtctgtgaaaataaaaaaaaaaaaattatttatttaaaaatgttttaaagttataaagacaattctctctatctttaaaatctctatatccatttttatatctcatttcttattcctaaatattagttttgtctaatcagacttgctagtgatttgttattttatttatttcaaagagccattttttagttttattgactgtctgtttttctttttagtttattttctttgactctttaactmtattccatttctttcaacttttgttcctaacctttttttttttttttttttagaggcagaatctcattstgtcacccaggmtagagggtggtgacacaatcatagcttactgcagccttgaactcttgggttcaagctatactcccacctcagccttctgagtagctaggactagaggcacatgcasccatgcctggctaaatttttaagttttttgttgagacaggatcttgccatgttgtccaggctggtcttgaactcctggcctcaagcagtcctcctacctcagtctcccaaggtgctgggattacccgcttgagccatcatgcccagcatcttttaaacttctagtagtttgaatgctttttctaacttctaataatttgaatgctcattagttcatttttttttcagtgttattttcctgtgattatatctttggccgtatgccgtagggtttgatacatactgcttttattgtcattgatttctattttctctttaaaagtaatttgctacaattttttaaagatctccaagtggaaagttttgttattattgccaatatctagttttattatattgtggtcaggaaatgtggtctataaagatgtgtttgtgcctatttcacagtcaatttttgtgattccataggtgctcattaagaccatgagttcttgactgtgtacaaggttctttgtctattaaatcaatgttttatgtatttattattattgcttttagagatgtgttcttgctatgttgctcaggctggataactcctaggctcaagtaatctycccacctcagcctcctgagtagctgggagtacaggcatgtgccattgcacctggctctattaaatgaatgttcgaagcttttttattttgtgagtctaggtcttatcaacttttgagtgacatgctcaagtctcccactgtgattgtggatctgtgttttgtttcttgtgtatctaattttcaacttgtgtacatcgttttgttgcagattgtcttttgtaaatggggctaatagccaatatgaactggatagcatactggctgatatccattctcaacagtttaagcctatgccacattagttttagatagttttaatattatccttgattttcatagcttatacttagatttggggttcttgtattttgtttcccctgcattcctgcccccaccaccaaccctgaccagattttgtattataatagggtagttttattctgcccttatattttgtattttgtttcctctgcattcctgcccccaccaccaaccctgaccagattttgtcttataatagggcagttttattctgcgcttgtattttgtattttgtttcccstgcattcstgcccccaccaccaaccstgatcagattttgtcttataatagggcagttttattctgcccttgtattttgtgttttccatccactstgcttcgttgcctttcctcccttttcttgcmtatgccagatttttttaagttgtgatgagggaaaacatttgcatatgtatatgtatatgtgtgttcgtgtacgtgcgtgtttatacatctgtgtctgtgtctgtgtgtatatatatatgtttgtataatttttatttcctgttctgtgaactgtcagtttatatctttttatctgtgtctgttgtgtgagcggtcattatctggatttttaggaaaatttgacctttttttctccaacgtgtactaaactttttaagtttgtattttcttcttttgacattgtttatgctggggcttttttgttttttgtttgtttgtttgtttgttttttgttttttgttttttttttgagacggagtctcgttgtgtcacccaggctggactgcasccatgcgatctcggctcaccgcaacctccacctcccaggttcaagtgattctcttgcctcagcctcctgagtagctgggattacaggcacccaccaccacgcccagctaattttttgtatttttagtagagacggggtttcaccatgttggccaggctggtcttgaactcctgacctcaggtgatctgcccgcctcggcctcccaaactgctgagattgggcatgagccaccgtgcctggcccctggcctgtttttttttttttttttaaactatcttattaactgctttctatatactatactttgcttttttttcccatttctttactttttccctatttattatttttctttgactgtttccctctagtgatttgagaattatatgtgctaattttgtgcataccttagttgcttggaaattaacacatgtttacaatgaaaatatcctgtcatccttgggaataaattactgtctttttttaaacattcttttgcctacctcctttttctgtatgttccatatatttttgaatcttattccaggttatgataaatattaaaaattaactttgtagtaagttyttcttagtggttatttagatctcataaccatatatttgaacatcagtttagatgtaatcataaattactaccatttctcttattcaaagtattatttctttattatttatttatgtatttatttttgttttgagacggagtctcactctgtctcccaggctggagtgcagtggcacgatcttggctcactgcaagctctgcctcccgggttcatgccattctcctgcctcagcctcccgagtagctgggactacaagtgcccaccaccacacccagctaattttttgtatttttgttagtagagacagagtttcaccgtgttagctaggatggtctcgatctcctgacttcgtgttccgcccgcctcagcctcccaaagtgctgggattacaggcgtgagtcaccgcgccaggcctattcaaagtattcttagatttatttttctttttcctagataacatcctagaattattttccgcaaaacaattatgtagctaaactttgaagttttatatgtcctgaaatgttacaatttttgcccttacacttgaataataattttgtaggaaatagatttctacaaaagtcattttgctcaaaacttcaaaacatccatgaaacttagtgccactttctaaagttaaaaagctatgtaggacattgctatgacattatagtgaaaattttaaaagttacaaagcagcatttttagtatgcctcatttatccatatgtgtttatccatagacagaggtgtcttaagggatatttatcaaaatattttcaatagtgattgttctggttatctagtgccatacagtaaactgccccaaaatttaatgatgcagaataataaccatttgattatgttcatggattctgtgggtcaggaattcaaataggccacaggagggatggctgggcagtcagctgagaaggcttgaaggggttacttctatgtctgatgcctcaactgcaacgctgaaggacaaactcagctggttctgtcaccctacatagctgcatatggccacccagatggtagttttatgggagttgaacttcttacatggtggctcaggattccaagagtgagtgttctagttaagccatttaggccttctgtgacccagcctcagaagtcacgtagtgtgctttcaccataccctattaatcaaagcagtcacaaaccagtccagaatcaagggaagggaacatagacccaacttcctgatgggaagattgtcagaggatttgtagctatgttttaacaccaacagttggcaagttgtcattgataagagtgttggctaaatgatgacaggaattatttttaatctcttctgctcactactgagccccagaagagtgcctggtacatagtagtgtttgataagtatgtattgtatgaatgaggtttggggtttctgctctcctaatgcctttctgtactatatgaacttttcacagtaagcacattttatctttataaatagaaataaaatgcaaataaagggtatatattatctgaatgttttaattttttctatgatatcctagatatttaaatgatttttatgagttggagctacagcatggctctggtgttgtgggttggagcattccagtgactaaaggggttgtgccttctccaagagaatcccacacagctgttatatattgcaaaaaagattctggaagtcctaaaatgtatgtttttggtggaatgtgtggtgctcgcctggatgacctatggcagcttgacttaggtaagtttaacttgattcaggctcaggaatagggcaaattaaraaatgctttgaaaaatattattgattgcagtatttattgagttgtacttagatttataaccagcacttgtagccccagggacagtgtatgtgtgatatgaatggttgctgataaatcagattgagaaaatgaatgtttggtttatgacagtaactctcttgtgcattctataaatagggttaccttatgtcctggtttacctgggatgattctggtttatgcttattgtcttgtgtaattatcartagtacaatactccctttcactctgaaaaatgtcctgttggggatgataactttatatggttaccctatctacaggaaatgtagcattaacaatgttattcgtggtcagtaaaaaacccttaggtagttctctctaaagggatcctakgaatgaatgattggagggtagtgtgcctctcacctttgactatcttctgtccagtgtactcttacttaaagtggtaaaatctctaatattgtttttaattcacaattggtggcaccctaagcacacttrtttattacaaatacagtcatccctcggtatctgtggaagatttatttaggacctcccctaataccaaaatccatggatgctcaagtccctgatataaaatggtgtagtatttgcatattctcccatatactttaagtcatctccatttgagattacttgtaacacctaatacagtgtaaatactatataaatggttgttatactgtattatttagggaataatgacaaaaagaagacatgtgcagtgcagccaaagattttgtgaatattttcagtctgtggttagttgaatccatggatgcagcacccatagatatggagggctaactgtactaacattaagtgtaaataaatttctgattggcagtttatgtaagctggaaatgtttaagataatgttcaaataactgttctaaaatactttgtttcattttggtaagtccttgttttattttttaaaattatggaagttgaggtaatttactcttgttagatcaagttgctaatataattatttttacttttagaaactatgtcatggtcaaaaccagaaactaaagggacagtgccacttccacgaagccttcatacagccagtgttataggaaacaagtatggtggttttttgtattttgcttctgttttttttaaaaaaacaacttaagaagcacacaaagaaagtaatgctagtagtttcttggaaatagattatgaaacttaacaaagtttgattgtgctgactgaagctaaaataatttgtctgtagaagttaaaatacttaatgtgccattttcttatgctctctcttttacttctttgcattccttataatgccctgcccagtgtaggctttatgtaagtgttaacctgggtgttgccaaactaatcacctaactcacttttcctttttcatatttttggtagtgcttcatttgtactgaggcacatgctcttaatgattatgctttagattgcaatatagagttgatggttagaatacaaactctgtgaccagattgcctaaattcaagactcagctttggcacttgtcctgtttgacctggggcaagaaaatttaatctgtttgtacctcactttccttaagtatacaatgtggattaaagtaaaacttacttgacaaggctgtaatgaagactaaatggattaatacatatgaaatgcttagaacagtttctggtatgaagtgagcactccataaatgttgactgttactaccatcaacaaattcccttatttgtgcaacattgtgccacaattagaagtactgtttaattagaatttaatgaaatatttactattgcagtaatattaaatattaaatgtaatagtttaggaaatgactgttgtaatttagaacctagttttttttttttttttaaataaactcaaaaccaaacaggatggtctttacatttaaacaaaatcttatacatttttttaactgaagaggcattttataaaatgaaattttccattgaaaccccaacatataaaatggattttaaaaaatagagctgtagccaggcgtggtggctcatgcctataatcccagcactttgggaggccaaggtggaaggatggcctgagcccaggaggttgagtttgcagtggaycgttatcatgccactgtactctagcctgggcaacagaacaagatcctgtctcaaaaaaaaaaaaaaaaaaaaatctctggttggcataaaaaaaaaaatagatctggttgacatcaggtcaaatgggccctgatttctgcctaatgagcctttctcttccagcagccatcaggcttgtcttaaraactcctagggccctaaaggaacacagtttaaagttttttgtttaagtgatatcaatgaccaaagttatatgaaatttaatcctcttcggttactatatgcatacaattttaaatttgactttggatgtcatakatcaattgagtgtctctctgactgaggtacccttagtatattataggcaatattgatttttaagtatattatagttgaaatattcttcactttaagtaacttgccagagagaaataattgtgattctgtactgcttcataaaattgtaaactcttgaaaaaagaccactttattcatcttcttattcccattaccttgacaatggtaagcgaatgaatagttctgaagctctgagtcaactgataggaaatttttctattcttagcacttcaaatccaagaagtaaaatgaaataagctactttatgtttttgttytgttgttgctcakgatgtacatttttggtggatgggtcccacataaggsggaaaatactgagacttcacctcatgattgtgaatggagatgtaccagttcattttcttacctaaatctgggtgagtcttttaagagttactcattgaattaatctttattaataagataatttttgtaattttgttaaraacaaaagattagtcatggatatttctatcttttcagatacaacagagtggaccaccctagtatcagattctcaggaagataaaaaaaattcaagaccaagaccaagagctggccactgtgctgttgcaatcggcactcgattgtatttttggagtggaagagatggctacaaaaaagcactgaatagtcaagtttgctgcaaggatctttggtatcttgatactggtaggtaagaatatttaacaaataaactttttcctttaggtaagcactcaaatgtctgccttttgagacttactgtaaatgctactacctcttgtttcccataattaagtatgaatggaagaaacaatatgtatagttattctccactcctgagaagtatataattatcctctccttgagtgtaggctggatttaaagactcctttgcaaagaataaagtatggaaagggaaaatagtagctttacagaaacctggcaagcacgagaaacctggcaagcatgagaaacctggcaagcactaccttaatcaagtgatcaaggttaatatcactagtgataagttagtatcatttactccctaatatcatgtgawaagtgaaagtacctckgtggtattcccaaatccataacctcagcctaactatgagaaaacatcaacaagcccaaastgagggacattctagatcttctacaaagaatatgtgagcagtactattcagaagtttcaaagtgaaggaaaacaaggraagactaagaaataatcaaaaactggaggagacaaaggagacattacaactgaatgtgatgttgtgttccggattggatcctggaacaaaaaaagacattaattgaaaaactggtgaaatctgagktgtctatagttgagttaatagtattacaccaataatttcttagttttaacaaatgtggtaatattaggggaagctggagaaaagggaaagctggggtcagggggttatggcaatgctgtactatctttgcaacttttctgtaaatctaaaattattttaaaataaaagattttaaaaaaatatattagaggctgggtgcagtggctcacacctgtaatcctagcactttgggaagctgaggcaggaggattgcttggggccatgagttcaagacaagcccaggcaacatagtgagaccctcatctctaccaaacaaaaaattagccaggcacagtggctcatgcctatagtcccagcttcttgggaggctgaggcaagaggttcacttgagcccaggagtctgagtctacctacagtgagctctgattgctccactgcactccagcctgggtatcagagcaagaccccatctcgaaagggggaaaataattattaaagcaccaaaatttttaaaaatgtgtacctcacatcgattttgaataaatactgattgacagctgcgtagcaggaattgttctaaatgctgagaatatagcagcgaacaagactgatagtgcgcctgctctcacaaagaacttacattctgagggggtacgacagcaaggagataatgagcaatagtgaaacaggttaacaaaataagttcagtttctgttaatcatatgaatacatgagatagtggtgttaggtattgggcgtgggagtggtggctgcttcagggtgggtagtcaaaaaaggcttctgtgatgagatgacatgggatgtgattcgaatggtgagaaggagctacccacataaaaaggccagagaaaccactgcaggaggagggaacagcacatacaaggagtctgagatgggaatacttggtgtgtttggcaacagatttgagctgggtaaacaaagaggaaagtgtaggaatggaggttagagagatgaccacaggatatagggccttgaatgtggtgttagaatttctaagttatttttaaagtacagtgggaagttttgtgtaagtttgaaggagagatgtgacacattctgatgtacattttggaatggtcactggcagttgtatggaaaaaattgtaggtgcacactgcaagacaagttagaaatctcttgcagtagtcaaaaaagcgttttagactatagtggtgacaatggaggaggggaggactggataaattcaggatatattttggagttcttgttgacagaactggttgataatttgtgtggcaagtgaaagaaagggaagaatggaggatgaagtttttagcttgaattttactgagacagggaagattgagagaaaacagcattgtggagaaaatcaagagttccatttagaccatgctaagtttgaaataagatcaagcaggcatttgaatgaatagatgaatctagaggccattagagaaattagatctggagatgtaatatgtgatgttatatgagaaaaacagattataaaacgtataatgactccagtgttttcaaaattataaatagaaaacttggaaggacacacaccaaagcattatctgagagctgagattatacattttcttcaaagcttttctgtcattacttgtctgtattttctacagtagcatgtattgtttttgtaatgtaaaaagagtttaattttaaaattaagatagttgaaaaartaatgaaacaagagagtaaatgctttctgtggaagaagcatatactagcaagcaagaaaaaaatatagaaaattcaacttactagtttatctttgaaattggaaattattaactaaagtctaaggataagcttcagtctctgaaattggatgaaaaaaatgtgtatgactgaatttttctctgtagggattatatcactttgcacagattctctaagggatctgtgacttaaaaagatttttaaaaattggatttgaatggcctgtttttctataaaccttttcataatgagctttagatatcagtattcttctaaaagtaatcatggctatgatcataagggcaaaatatagattttgcttttcctcttgataagttagcatcagttttggtggaagagggggctcatcttgtttttttttttctttttttcacttttagttaaactttgtgcatttgatagcatgtaaaagagtaatagaattccatgaggctttctatgaaaaatcacgttctttgctcgcacctttcctcattttacttgctttacaagcatttatttgttcttaactctgttaaatgattctttacttccatatctctatatcacatgcatatattgttactttgatgtattttttttttcatttaggcaataatgtgctcactttctgctatggaagttaaggatttatctcttcctcccaccattttttttttttttttttttgaggcggagtctcactctgccgcccaggctggagtgcagtgttgcgacctcggctcactgcaacctccacctcccagattcaagtgattcttctgccttagccttccgagtacctggaattacaggcgccagccacaacgcctggctaattttcgtatttttagtagagatggggtttcaccatgttggccaggctgccttggcctcccaaagtgcagggattacaggtgtgaaccaccatgcccagctggtagtacaagtcttgataagggagtattaacttcagagaagttatgcttttgtaaaatatcatgtccaagttatctttgctaacattaacagaattgctaaaatgtacgctgttggctgaaaattggctcataaaattaaagaatattagaacttctaagaaagataaaataatgtagctttaatacttggctccccttgcctctccccagcctccccccaaaaaccttctaggattcccagcttcccccagaaaaactccttctaggattaaacacatttccaaatctgaagactcatatagtttggtagtttcgtactggattgttttgtttatagatatatttgtctaagaaaataaataaataaataaataaataaataaataaatagaataagaaccccaaactatttttatttgacctactgtagctgtgtttatctgagtaaactttccctgtcttggtaagcagatgaaatgttcattgctgatgttttcaaagctctggtccacacaaattatatcagcaaaccatttatacactggaaacttaaatgtataatatcatgattgttctatagagaaaccaccggcaccatctcaagtacagctgatcaaagccactaccaactcctttcatgtcaagtgggatraagtgtcyacagttgagggctatcttttgcagttgagyacagacttgccataccaagctgcatcatcagattcttcagcagcaccaaatatgcaaggtaacataattttcatgcttaaagtatgtgtgctcacatgcttttaaaaatatatactggccgggcgcggtggctcacgcctgtaatcccagcactttgggaggctgaggcaggtggatcacctgaggtcaggagtttgagaccagcctggtcaacatggtaaaaccccatctctactaaaaatgcaaaaattagcgggtatggtggtgcatacctgtaatcccagctacttgggaggctgaagcaaaagtatcacttgaacccaggtagtggaggttgcagtgagctgagatcatgccactgcactccagcctgggcaacaagcaagactctgtyttaaaaaaaaaaaaaaaattcacacacacacgcacacaagcacacatatactrcagtacgtgtgtgtgtgtgtgtgtgtgtatgtgtgtgtgtatatatatatacatatatatatatatgtatatatatatacacacatacactgcagaaaagtctgtgattaggtttggtttaagaaattttatgacattaggtccatgcctgataattcaaatacattgtatttcagttctaaaacttggatgtcttaccattatgatgtagtagaacacatagacacgtaggatagattgtgttttctgcagttcatttttatgtactttcctaaattgacatattagttgacttcagcagatggctttaatttgctttcataaatatcttagcttttttcaaaagtatttttaactaaataggccttggaagtaaaagcaaacacaaattttgcacatttttccagagaggatttcagtcaacttaagcaaactattaagaaaacatataacctttggtaaagatactactttttaaactttaatatgtaactytaaaaatatttaattatattttattgaagctagttaagagcatatcagtctgaacctttctcattccttcaggagtcaggatggaccctcacagacaaggcagtaataacatcgttcctaacagtgtaagtaaaaaagtgtatgaaggtaattggatgtttatggttatagtctcaatttttattcagatatttagcatactactactctagaagaggggtccttaatcctgcctgcacttgagagttatctctgaggtaaacaaacaaacaaacacagattcccaagctcttcctcaaatctagtgaagcagaatctwtaggaaaatgcccaggtagctctgtttttgaagaaagcttcacagatcgctgtgacagaagcctgaattgaaaacccaggccaagggaagcctagctgcattacacagagcatcagactaattgaatgtaatgtgtacttatgtgtttattattttgccatttctaaatgtcacacaaacaaacatctaaagatgtactttaaaaatatgtataaaatattttctttactrtgtattttgtttactgaagaatatcagttactaaattgaacacttgtgaggttctttcttgtttatgaagtgcatcacagtaggtcttggtagagactaacgaatatgcttactaagattcattatttttatttgrtaaactgccatctacctcagtagactgttttcaaggaaattgatgtaggtattggctcatacgttctgagtatgactgaagaccagtaaaggcataggtccagaagtatatcatgtcatacttatagtatgtcaggaaggggttattacaagtaaagctcatacagtttgtaagtagcctgtcatattagacataatatttctattatatatattcctatgttatatgttgattatatactatatatgtgtatgtgtgtgtatcacaaatttagatgatactgtaaagcttatgatgaagagcagtagtttcctaccctgtccctacctgctcttgatttctgttccctagaagcaactactttaaactatcgtagctttcttttggtatctaactatgcacagttgtccttctgtatctgcagggctttggtttcaggacccaccccccacagtcccctcgatattcaagtctcacagttggccctgtggaacctgcaaatgcggaaactcgaccctctgtatccacagtttttgcatcctgcgaatactgtattttccatatgtgtttggttgaggttgtggaacccacagatatggaggaccaactgtatttattaaaaataatccacggccaggcgtggtggctcacacctgtaatcccagcactttgggaggccaaggcgggcagatcacgaggtcagaagatcgagactatcctgactaacatggtgaaaccctgtctctccttaaaaaaaatgcaaaaaattagccgggcatggtggcgggtgcctgtagtcccagctacttgggaggctgaggcaggagaatggtgtgaacccaagagacggagcttgtagtgagccgagattgtgccactgcactccagcctgggtgaccgagcaagactcygtctcaaaaaataaataaataaatagtcacacagaaatgaacccttacagttcaaactcatgttgttgaagggtctacttttagatcaattgtcttcaataatgaaagatgacaatttaatgatctcttacaattttgcctcatcccctcctttcstgttcccacatccttcacatatttttagtagaattatgacttgatgtttacactgtgatggtgaaatagttgcaggtgagccatgtagtgtgctatgataattactcctttttcatgcaactttgtttttcctggcattaacggcctcactttttcacttgcttagttttcttcttgtctatcattaattcatactcaaattttctaaaaaattataaaacttaagatatttggacataaaggtagtttcttttttccccccttggaaccattcctcctggagccccctgtccttatgtactggttcttctctaggcctgctgcacagctgtcaccttagaactaacttctctctgtttcataataggaatttatctctttcctgtgttacagcccatatttcttgaccttatttcttcctctttctttgtattttcctttatttcgttgcaaccccctgagaagtgggcttttgaaaggtaaattttttgagatcttgcatatctgaaaatatctttagcctatttaactaatagtttggctggcttatagaatcctatattggaagtttttccctcagaaatttataggcattttttctagtgtcttttagcattcggtgttggtattgaaaagtgtgatgccatttggattcctgatcctttatatatgacctaattttttatctttttatccccagtatgctgaaatttcaacaatggtgtgccttagagtgcatgtcttcatttggtgtgcctcacccagtggatcccattgttcgggaaactcatgaccttcattactgatgatttcttccctcaatttcttttcttttttttttataaactagtcctctgattttgctttttatcttctgtkttctctgtgtattccaatttttacattttaaatatatccaaccacatttttaatttctaaaagcctcattttattctttatttctgtkaatagcaccctattcttgtktcataaatataatatctttccttctctcttgaagaattatacttcaaaaattttggagttttagtctgctctttgttatgtttctttttttcaagctcctttttatttttcaatgtgttttaaccttggacttccacattagaggttgtcatcaagtgtctggtgatacttggctgtccctttttgtttaaagtgaggctttaaaaaagcctggaaggcctatgcatgtgggtgtggcttgttgcttagtaaaccttaacaagagtaagtgggcggggaccaacaaatgtaagtatcagtgggtcttttttcttagaccaattagtttcccckaagaattctccaacctcttgcttaggggttatgagcctgrctatcagaattctgggagcttagtaaggggattggagggaaggtatctttttgttcagcatttagactttcatttaattcctattttcagtaggggtgcctctccccatacttgtatcatcctcatacttgtatcacttgagcgataccgtagcgtagtctakagactcacatttcaacctttctgcctatttcccatcttcagctagaatggaggagaggaatttctctggcttggtatgctgggagagcasaactagggctacagcccttcttaaacaggcttctgtgtgacaggcctccagcgttttcttgtactctgcacctctgccaccactgactgcactgggccctggggcacaaatgggccacatctcagtgactttccacttaggagaargctcttagctccagcttttctgtcttacatcttatctactattttctcttctgccattctctttttccttaaaargttatagcttcatactttcaaaaattccttttttgtcatttgaattgggttttggagawatctcctgaagagcaaatgtgtttaatctatcrtgtttaatgaaaattctcaagatttatttatacttattttataaaattccagttagactgagtgtctgattttaagcaaaragcacattccagatgtaaggattttggaatgaaataaaccaaattcgaattctagstgttacttactggctacctggctgtaggtgtattacttaagttctctgagtatcattttyttcatmtataaaaaaagggtcragttatcttactgataggattcttgtgaagattaagtaagatacagagtttatggatatatatagtacactgcctgccataatgcctggcatagttgtggctatcattatcatcatcacttataaacagtagcaccaccaattaagggcaagcacagggcatattatagacaagtatcctcagagctatgagaaattatgagccaacaataaaaatagagagagmacagtaacaaaaaacaggtaattagaaagaacaacaatattagggtatttgaatgaagccaggtcacttttatggttaggtagacctataggtttaataactgatattcacattgatgacttgaattatcaaaagattttaaatgtggcggctgggttctgtggctcacagctataatcccaacattttgggaggccaaggtggtagatccttcagctcaggagttcaagaccagccttgacaacatggcaaaacctcatctctacaaaatatagaaaaattagctgggcatgctggtgtgtgcctgtagccccagctacttgggaggctgaggcaggaggattgcttggcaggcagtgactgccatgaactgtgattgtgccactgcaatccagcctgggcaacagagcaagatcctgtctcaaaaaaaataaaaataaaaataatttttttaggccaggcgctgtggctcactcctgtaatctcagcactttgggaggctgaggtgggtggaccacctgaggtcaggagttcaagaccagcctggccaacatggtgaaaccctgtctctactaaaaatataaaaaattagccaggcatggtggtgggcacctgtaatcccagctacttgggagactgaggcagcagaattgcttgaacacaggaggtgcaggttgcagtgagctgagatcacaccattgtactccagcctgggcaacaagagcaaaactccatctcaaaaataataatagtagtaataattttttttaaaaagtgtgaatgtgtttattatagtgtgtttaagaaggttaagaaaaatgtaattagggagattcttatccaaaatacttcatggtataggataatgatatgtatatgtatgaaatctttatatggaaaactcagtcatataaaatagtttatttgcttgaagattccatatagctgagattttacttttgtagttatcatatttttaggatacatgtctgccctttaagaaaatttgaccagacccagtagctttgttctctcctgtgttatatatgtatttgcttgtgatactagctatcacttactaaaatgtagttttttttcctcaaaatatactctccctttcctcttcaaaactgatcttttgagcatggagattaagtgaaaagaaattgttttcttagaaactattataaaattgaagaataatcctgtagaaattaataatgtaatttttaggtgttttctattttgataaaaagtatttaaattgtaacttattttgcttgttttttacatgtatttgtatttcattgaatattgcttactacagtaatctgttatatttcttgtagatcaatgatacaataaacagcacaaaaactgaacagccagccacaaaagaaacttcaatgaaaaacaaaccagactttaaagcactgacggattctaatgccattttatatccatctttggcatcaaatgcttctaatcataatagtcatgtggtggatatgctaaggaaaaatgaaggtatatggatgacattttaaactaaagctttttataaaatcggtggggaatttaatagtcattgaaaaagtaaatgttgtacagttttgatccattttcctaatagcaaaaaactgccatattcaacctggttagaataatgttaaaataccaagtaagcacttacctgaacagtaatgattagttatgaactatggaatttaaatgaggcaatttttttttttttttaaagaatagcctctccatcaggaagaactatagtagaaaatgattaggagatttgttagggattcttttaggactccaggagatgcatagagactaaagcagtggctgactccaggagatacacagagactaaagcagtggctgaaatggagaggcgagaattcatcatttaagagacgtttagaaggtttcatctattagacttgacaactggttgtatatgagaaataaaaatgagttgaatatgactcccagttttttgggttggacaatagaatagataatgatactcttcaccaaaataggaaatataggagcaagaacagattttggaaaagataggttcaactttgaactctgtttttgaggcacttcagcaatatactggtaaagatttctaatgggcagtcggatacttaggcctggagtctagaaggcagtactaggctagaaacataaatttagaaattaagagtatttaaatgtaatctccaaaagagcaaggatcttgttgacttgttcactgctagattcctagcacctggtacagtgtccaggacatatgtatggatttgggaatggtatttaacgcacagaaaaatatgtaaagggcgacaagaagaaggcttaagtttgtgaggcatgatctatgcctgccttatttcaccattataaaaacaaatacaatgtctcatacatggtagacttcactgttgtggaatgaataaatatacgtcataggaaaaaaaatagcttcaaaaaggagtatgtggtcagcattgtttacagtgcagaaaagtcaagtaaatgaaaattgaaaaatatcccctagaaatcattgatgtttgccagaattattttattaaagtagtgtgctagaaatcaaattttggggagatcaaggaagtataaactgttctaaagggaattagtaaggggagagggtaattggtgggaattgttgggtaaacaaagaggtgcgttgtttgcttcagggatttgatgatgtttacgagccaaggaccaaaacctactgacaaagaatctgaaaaccctgaagagagaggaatgattgatgagggtcccaacatataggggaaggaatgggaccaagagtacaggaagatacattcagattttttaggagagaggtcagcaaatcttctgcaatggaagacagggaggatgagcacaattattagtacaattctagtttgcagccagagaaggcagaaaattgagataattcatgcttaatgacctctaatatttttttcctgaaatgaagggcagagccatttgatctatgatttagtggaaagtcaagaacaatggttcggtgtttagaatgaacgaggaaggtaaaaagttggatatccattatggatataatgcastttatttttctaaacattttatgcctaatggataattcatactaataccatttgtggtgctcatgtatgattttaaaactgaaagtaccaagaatcatatgacaagaacgataagacacaacaattatctgcagatatcatattaataattaccytttcccttttattttaggtcctcacacttcagcaaatgtaggtgttctaagtagttgcctggatgtaagaacagtaattcctgaaacatctgtatccagtactgtttccagcacacaaactatggtaacccagcagaccattaaaactgaatcatccagtacaaatggggcagttgttaaagatgaaacttcactaacaacattcagtaccaaatctgaaggtttgaaatgtgtttcacatactgtattttgaaccatttatgtatataaattcatcaaacttacttgtcttagatgggagttgcatttcatcttggaattttgttattagtcattttaacttaatttctgtgagcaagagttttcatttgacctaaatttaacttttagaatctttaagaattctttttagtttttgttttctttctatcatgactttatggattttgaccatatatttacctttatcagctttcatctttccagaatgtaatgtaaacagataaagcatttcatttaaaattattttataaaatattctctgcataaaatatttagattagcacacactattgaaatacaatcagaatgtgtctttcctaccatgaataaatttagcaaacttttttttagacaagattggttctagactgtrtattaacaattcttccaacttgcttgatttctaatttgataaattctttattcttttgaaataggaattgtattgcatctttagtgaacattctctgaagttttagctagtcatcaaacccttgaaaaatgaagtttatgaattgttttgagttaaagggtcaatattactacttattgtaaataatagtacaataccctctggctgttttttattgtgataaaatacatgtaacataaaatttgctgtcttagccatttttaagtttacagttggtggcattaaatatrtatttaaaaattatattttaatgtatctgataagttatgtaaatcttatctgataaattgtttaatttttagttgatgaaacatatgcactgcctgcaacgaagatcagccgtgtagagacacatgctacagcaacgccgttttctgtaagtacatgacctggtgatgatgcatgtttacacatgattatgtacttttaaatgctgagcaacttctaaataatttcataaaaagattctcaggtctcagtaatgaactgacataaatttagaaataaatgattgaataggaaaatgttcacagtataatgtttagtgaaacagctggataaaaaataacatatgtgttgtgttcccaattttattaaaaaatacatgcagttcatacatttatactctcacatgtacccacacataaccactctgaaatccaggtggggggccacagatacttttgactttcttctttatgctttttatatttttctataatgcaatgttatttttataatcagaaatgtgtgtatgtatatatacatacatatatgtgtatatatgtgtaaattacattaatggttaaaagataaggtgtgttatggaacataaaacttgaatggctgtattgctagctgcttaataggarcacaacagaatattgcaatagtggattgacataaatgtagggtagcccaataatctctgatatttggttgtcttacataggccaaatttggtatgcatggcaccaaactttaaatgccaggaaagtgccttacaaatataccaagattgtcttacttagataaatacaaggataatacatacatatatgtacttttgaggtttttttttgttattagtcatttcaacttaatttctgtgagcaagagttttcatttgacctaaatttaacytttagaatctttaagaattctctttagtttttattttctttcaatcatgactttatgggttatgaccatatatttacctttatcagctttcatctttccagaatgttaagttctagtgtttttagactcttcttagggaaggattactaaaatgaattttttttctcttgagtctgttttgccatgcatcagccagaattgtatttgttatttgagttggagccagttgttttataaaagttgttgaagagagtttttacaactttatagaatgaaaacaagtttaaagctattacttttttttttaactttaaagactcttctagttagctcactttgtcatgtgtgatagcctaaatattaaaaaaatgtgaattataagcatgtacctctgctgttatatatttaagacagaaataaataactgaagtgcacatttgttttgagcttctggaaacagtgtctcatttataagaagatggctttaaaaggttagttccagggataagtataattcacttaccactaaaagtagcttaaggtagaggaagtttatttgttttaaaacaggataaaaaatgtaaaactgtttaatatactcctctttagtatataccaaagtatattcaaattgcattttagttttgaacattttttctccttttaggtttggagaatcacaggtatttcaagtgcaaagatcactgaatttttgctagttgtttttggatctagaaatgagccagcttggaatgaatttttctgtatttgctcctttggagcaagttgtaatgttacgctaaaggaattacattttctgagagagtctctgaaatgacaatgttctataaaatagctggcattttaacatatcactgattggaaagcatgctaactccagctaggttgatagtacagagctactgacttggagaatgcctgtcactcctgtgtttgaattggcatccctgtttcactgtcagttgacctaatctgttaagactttatttacttatgagttgttratgttgtggtgtttatccaaatacctacttgtagatcactgcatggacttattaaatcttgaaatttttcgtatattcaataagagtcttcataaatttttttttctctgaaattagaaagagactccttcaaatccagtggccacagtgaaagcgggagaacgacaatggtgtgatgtgggaatttttaaaaataatacagctttggtgagccagttttatttgctgccaaaagggaagcaaagcatctcaaaggtagctattgatatattttctacattgtaaattataagcctcaaggatgagatttttctctaccaataacttagggaaaggaaaaaaaaattaagaatgagatttcttttttagaaccctgattcaggtcacttgaatgagtaaaattgggatccatccacaatctatataattgagaattctgtataccaaatgtattaggccattctcgcattgctgtaaagaaatacctgagactggccgggcgcagtggctcacgcctgtaatcccagcactttgggaggccaaggcaggcagatcacgaggtcaggagatcaagaccatcctggctaacacggtgaaaccccgtccctactaaaagtacagaaacttagccaggcgtggtgacgagcatctgtagtcccagctactcaggaggctgaggcaggagaatggcatgaacccgggaggtggagcttgcagtgagccgagatggtgccactgcactccagcctgggtgacagtgtaagactccatctaaaaagaaaaaaaaaaaagaaatatctgagactggatggctcaaggttccacaggctgtacaggaagcatgatgctggcatctgctcagcttctggggaggcctcagaaaacttccaatcatggcagaaggtgaagggaaagcaggcatgtcttacatggcatgaacaggagcaatgcgtggagtggggaggtgccacacacttttaaacaaccagatctcatgagaactcactatacaatactaaggggggatggtgctaaaccattcatgagaactctgcccctacgatccaatcacctcycatcaggtcctacctccaacactaaggattacaattctacatgagatttggtgggaaaacagatccaaatcatatcaccaagttacattgtattctgtgttaaggccctttgtatggactacatcacaagcatgtcatttaaaaaatctttgaaccaggtgtggtggagcatgcctgcagtcccagctactcaggaggctgagtcaggaggattgcttgagcccaggagtttgagactgcagtgcagtatgatagcacctgtgaatagccactacattccaaactgggcaacatggcaatacctatctytaaattwaaaaaaaaaaaaaaacttatacaatcactgaggtggagagttttttgtttgtttgtttgtttatttgagacagggtcttgctctgtcacccaagctggagtgcagtggtacaatctgagctcactgcagcctcaacctcctgggcttaagttatcctcacaccttggcttcctgagtagctaggactacagggacaagccaccatgaccagctaatttttgtagagactgggtttcaccatgttgcccaggttggtctcaaactcctgggctcaagtgatccttccatcccggcttcccaaagtgctgggattacaggcatgagccaccacacccagccaatgagctgggttttaagtcataaataatctagtctgactagcacaaataagagttttttgaaatagctctaattttgttaaccggtgtgtctagagaatggaactttttttttcctattgaaaaagaatttttttattcctcattttacaattaaaagaaatctaaaaaccctgatatgctattaaatacaatctaatgttcccttgattctgaaaccccttaaagaggacctcatatacatatatgagatattttatgtatatatgtaaattagacatttaagcttctaagaattattaaatagataacagctccaaagcacattggaaaaatttatgaaggccaggtgcagtgactcatgcctgtaatcccagtactttggaagtccaaggtgggaggagcttgagcccaggagttcgagaccagcctgggcaacatggcaagatcctgtcttacaaaaaataaagaagttttctgggcaaggtacgtgcctctgctcccaactacttgggaggctgaggtgggaggatcacttgagccaggaggtcaaggctgcagtgagccatgttcaggccactgcactccagcctggatgacagmgtgagatgctgtctcaaaaaaaaaaattattaaatggacaatttctgagagagaattgccaaggaaatagatgttcattttgaatctcccgaagatatgcacaaatgaggattatatcctatatatttatatatattttagttgctctactattactcctcatatccctctttttcatacagaatttttctaattcttgacaaaaatagaaattctagttaataattagtattatgcccagtgaaatttctcactgtagtttgatttcatatataaagacgtgtctgtgtctaggggcctagtagctacctgatttttcctaaaagaaaaaaatagcctaaaatttagagctagtaaacttaggtttaaatcactagctccagcattcagcagtgtgatcttggcaagtcaacttgtttaatctctcttagattcagtttcctcatctgtaaaatagagatgacatggctcccttaaagtacgagaacacagtggcactctgtctaactgggagagttagggagaatatgtaaaaattgtttgaaagttgtaaatgttattatcttcctacctagagtatataatctaattatttaacatttatttggtgtctgttgaattttaatttaaaaaatgctctataggctgagcatggtggctcacgcctgtaatcccagcactttgggaggccgacgcaggtggatcacatttggtcaggagttcgagaccagcctggccagcatggcgaaaccccgtctctactgaaaaatacaaaaattagttgggtgtggtggcaggcatcggtaatctcagctactcgggaggctgaggcaggagaatcgcttgaacccgggaagcggaggttgcagtgagccgattgtgccactgcactccagcctgggagacagagtgagactccgtctccaaaaaaaaaaaaaaaattctctgtactacatgctagtcactccttttctatgaagcttgcttgcctgtctctaaagggtattgttcctgggcagactattatttgacggtatatcttctgagatttctgcttcaagataagtttacatgatgatgggatagttgtgtttatggcagttgtcagctttttttctaccttcacattgttcacgtgcagaatgctcttacatttctctgtgtaatcagtgattctcaactggaaagagtgctcacctctggataaggagcacagatttatggacttagttgcttgtctattggagggttcattccatgtgagagagagggagataaatgtgaaccagaaccttaaaacataatttattctttaaaagtttttttgtttaataaaaattgaataatttttaaaattttaatatattagttgtaccttttctttgacttttgcatatactacattttaggtaggaaatgcagatgtacctgactacagcttgcttaagaaacaagatcttgttccaggcacaggatacagattcagggttgctgcaatcaatggttgtgggataggtcctttcagcaaaatcagtgaatttaaaacttgtattcctggttttcctggagctccttctgcagtcagaatttcaaaggtgagacatcgggtcaagrcttgttggtgattttaaattatttgaaatttcacatgtgaagtaaactgtcagtttagaaattcttgttaccatctaatgaaatgagagatacctaaaaggatggatttaaagtttaaaaaataattttagctaatcattcattttttttaacttttattttaagttcaggggtacatgtgcaggtttgttacaaaggtaaatgagtgtcatgggggtttgttgtgcacattatttcatcacccaggtattaagcctagtacccattagttatttttcctgatcctctccctcttcccaccctccactctctgataggccccartgtgtgttstctccctctatgtgtccatgtgatttcaagcaaaattacagcatccaaatcacagaaaggcagggaaatctggtatgcttctaaatttgttcttgttattatggaacgaaaacatttggctggagaattttaatagagcactcgaaactggattatattttatcctaatgtcctgtccctccctagagattgtttaggaaataaaaatccctgttttgggatattacaggcagacatttaaacttagttgtgtttttgaaaagcaagcatgaaattaaacattgtagatccaaatgaggtaggttttaaaaatcaacaataaaagatgtaacatctaaygcaattattttagtaaaaatgaacattttgtattctaaagatagactcaacataataagtgataacasaggaaacttaagaacctttaacctgttttttcccccccccttcaagaatgttgaaggtatccacctttcctgggaacctccaacctcaccttctggaaatattttggaatattcagcctacttggctatccgcacagcacagatacamgataatccaagtcaacttgtgttcatgaggatttattgtggtcttaagacatcatgtrtagtaactgctgggcaacttgcaaatgcrcatattgattatacatccaggcctgccattgtgttcaggatatcagcaaagaatgaaaagggatatggaccagctacacaagttcggtggcttcaaggtaacaataagaaagcacctttaaattgaattggtttttttactgaagctattgtgatgatgattatttattagtaactggttatgaagatttgtcatttaaaagagtattctctggctgtatttccagcagttatgaacttgagtttgtaaattgttcttaaaatgtatttgctgaattatagatccaaataaaagaaaagaagcaaagactctctgaaaattagtatatgagttcttccttacagatatagctcttttataaagaaaaacagtgaaattaagataaaagctagaaagctttattaccccaatatcttttataagggctgtgtaacccagtcatcctagagttattgagatgattctggtaactggctgttgtatactatgctgtcttatatagtaaatgttctctacattgtaaatgtcctacctttgagtactccttctatctttattctatatgagcagtgttcctctaacaactgtcttctattggataatatgtgtgatactataataattctaatagttatttgattcctttctttgtttacagttagcacagagcttaagaaattaaaaaagaggcaagtttagaaactgcttttgaacttttattattttccaagaatcatggtaaaatacaacaagaacaatgagttttcttgattcttaccaggccaatatatttgaatatatttttggccaaagcacttaacttatctggccctcattttcctcataacagatgagggagttaaagcagtttatcttttaggtccctttcagcactaaggttttgtgtttttagtagaagtgaagtatgtccctgaacattttcatctgtcttaatggctctaattttgcttttgctaaaattaaaatcttcataattgaattcaaaattaaagtatatgtcctcctattggagaaaaaaacaagcaccttaacaggacacaagttttaaaatagtgttttaaacatttgtaagatttttgtaaatgctctaaatgttttatttttgcattgtttttaccttgaaattgtataaacttttttactatgaaaatataagcattagacagctaactcaggttccattacaaccttaaagatacagataggcattataaacactctgctacaggtaacttgttttaaaccttttaggaatttcatggttccactgcctatttaaatctggaattaatatacagagcaataattgcagaaaagatatttcaaactaagagcttcaataactgcaggggcacaggtctatctttttttataccacataaccttatgccagtttaggttgactgagtagctatgtcctcaaatttcatgtatgataccccccagcaaagatggatttaattgtgcagaattgatatatatgtgtgttccagttactaatttaaagtgtatagaatattttaatatataatttttgtaaagaactgggatttttatactacagtatttgtaattaatgtgtctcactaattaagtttctcttgaagaaaatatgcaaattgttagacacataatgagtggtttccaaactctaaagataaaataaatgcactactatggtgttgttagaataccttttttgtggctgtatgaatctttactctttaaatgtgtactttacaatgtttacaaggagcttctctggtttgttatcccagcaatgcccttggtgagagcttcattctgcatttgtttaattcatatgctttgcttttggcatatgcttgctttttgcactagtagaattttaacttacctcattattatgtttgtaatcatttgtctagcttctgtaatgtatctgatataggctaaacaaatacttaaccaaagttaaaatacatggtaagcaattttgcacatattaaatattagggtttgttgtgtatatgtgtatacttaattataaaagaatatgaatggaaagttatactaaaagtatatgtttcaagcccagttattttaaagatctattgctttaatagaaaaagtttggcttttaaccctttcttctctgcattaattaacaacgtgcatcttgaagcccttctcctgataacaaggaataagttgattttaagcaaaggatagaatatttgtttgagtgtgcacatttatacctgtttagtatttgattcagttaagcctccactcttctggatcaggaggtgattctgaacctgtggttctaacatatgacttaactgtttagagggaagagaagtctttctatactgagggatttgttaaaatcataaatgtttttgccctgagacttagcccagattctattttttttttttttttggcatttgtacattaagcaccagtcatatttatctctgtgataagggattgctgactaaaaaatgccattaagaaatctctgtggctttgacattagtagttaataagagatcttagagctgtgtgctgatgaatagaatgaattggagcaaatagcaagagaagtgcatttagcttcttatgatttgcacattttctaaatgaagatccctttgtgtagcagtaggctgtatcatgcagatatttttcataggatttgcactgagttaaatgactttctttactcttcccagtcaggtaagcagttcaaatataacaagactttgtgccagtcctcttctgtgttctgcaactctggctctcataagtagtaaaaatatttttgatgttgcatgctctcagaattatgttttctaaaatatcatattggcttcattttagtttaataaacttctttggcaacttaattagacatagggtatatataaactcaattttatctgcattttttaaaaaattgaaataatctgattgcatgtatgaaggactcctgcctcattacccaattacataaatacaattatctataggaaggtgaaattgttgatctattatttcaaagacttgtagactagcaaagattcattctgattagaaataaggtctatagctaaagatatttttattttaaaaaattacagcccttgtaacaaaaatcatttgtaacattggatatgaagacattattagtatttaaaattattgtagtcatttgatcataaatgaagtagcttgcaaaatagacttggtctttgaccctttaaggtgtaactgactgactgttgtgtttttcaagactgattttaggcagttttatgtatcgtgtaccaatgatatgtaaaataaagcaccttttctactataaacaattacaggtgttatttattttgaaggatatgaaagaaaagttagtgatggcagagtaaatctgtagaaatgttgattttatatttaaaataacattatgtaaacatattaaacatatattaacatgtttaataattaatatttaataattaacaagtttaataattgttaaacatatatttaaaaggctgcctgtattgtttgaaataatataggcagcctttaaattaagaatggattgtgtttaaaaacttgtttttaagtttttaagatggcagttgggagtcgttttctcatagaaatgtaaatcctatgtaagtaacccttgtcacacctgaactagtatgcttgaaagtaaaaaggcaaatggctccaagaaatagtctaaacttgttgtcaccttttttttgtctttcatttactctaaaatatttttctttattcttttcatccttttaaattcatagcagccagacttctgacctgctgctccattgaaatggctctagcaaagttcaaggataacctcccatttcccaaatccagggaactcttttatcgtatttaatcttgtcatttgaaacttttgtccactgtctcggcacttcctcatttttgtagtgtctatcataccatgctttctgtccatctttacacacctcctcctgtctatggttcccttttttactcccacctgtccccattcattttttttcctagattcaggccaaattgccaatctgaagaagtctttcctgacatactccaccaccaggtagatttaaccccttctttttgttctcccactgtcctttgttaaatcttctgtcatagcagtctaaaaacttagcgcccctatttgttagcatgtccctctccatctgctagatggtaggtcttcaaggcagagactgggtctttatacccgttccatgttggctggctagttaactggtacttaaatattttaacaagcgggtaaagaaaattgtcacctttacacttcttcatattcccactcctcctaaatagaggtcaaaatgggagggaagctttgaaagggaaagagattttttgcagatttgccaagtatctggaggaaatgcaaactctttagctttgtcttaccctgccctgctattaggttaaaagaagttctgggataagagatttagtataggaggtctttgattggaaaaggtccttctaccagatcaggtttgttttttttcttaaaggaaagaaagaagaaagatctttcatgaggttatgggcattgctggattatgatttttaacactggatgatcaaaataagctaaaactgtcaaaagttaatctctgacactagaaattacctacctatataagttcagggaactgctgaaggacatggttaccaggattggaactgcattggattctgttaatatcaagtcaggtcactgttatcacctctaaacttgtaggacaaaagattcttacactcaggaaaatgagatgacattggcaaaactcccttctaagttttctagttatagttagtccctagacttatgtatttctgtgactccagaaaaaaacttactttgatcattcctggaaaaacatgaactacaaaattctgggggaaaaatcaataaattctgtaaaccgaatgaagggcttatgtctgtaatcccaggccaaggcgggtggatcacctgaggattgaccagcctggccaatatggtgaaaccccgtctctactaaaaatacaaaaattagcttggcatggtggcgggcgtctgtaatcccggctactcaggaggctgaggcaggagaatcgcttgaaccctggaggcggaggttgcagtgagctgagatcgcgccattgcactccagcctgagcgacaagagtgaaaccccatctcaaaaaaaaaggccataaaatctgagaacaccagcttccttgttcaaaatagtgtccacttgtgggcctattaatctcagcagaggggatctggaactgagcatgaggttcttttgttttatatatttggtattttggataaattaggttgagcaaaggcctgctacttaatcgtcaaattcacaatctggctaccactcctgccagtacctcacattcaaaaaagttatgagaatgcaaggttataaagcctttggtcttggatagagagaatgctgggaagtcatagagatgaggttgtgaaggttacagaagtattccttatttactgattttaatttgcttgttcaaaagatatttgaagagtgcctagagatgtcagggtgtttacctataaaagagaagaaagtatgaattggtggcatatcagatatggaagatgtcacagagaaggaaacgtccccccccaccaccaccattctacccacttccccttcatggtcttcttacccccgcaaagatacgaagctaaaagatccatcattcctgagcatgagaattgaggaaggcacaagacgagccctttggtatgagcacatacaggttaaaaataaaaggtagcagctagtgtttgtttttgaacatagaaaaaccatgtccactagtaaattatactccaacaaatgtccagctccaaccaaaaagattatccattcctcctactgagaagatagagtagacgttctctgagaatttaagaagagttacctccttttctctttccatattggggaaggggcaaaaagctacagccataatgtttatcatccgctgtaacaaagcatagcatgtaagagagtgggcagagatctgaagataaaactgcttgattcacaatcatcctgccagttgcgatttagcaccccctggtggcattgtccagcccagcttacatgtggataagattctaggtcttgtagctgcctaggattttaaaaatagctacagcaatacctggagctttctggtgagttggcaatcctgtgttagacccagttggagagaatggacctggagaatatactttctactttcctgcaacttcctaacccaagataataactttaacctgccctgtttagatacagggacacactgattatttcaagatccatttaatttttgaggatttttagattgtttatcaaaatttctagctagttttctgaatcaggagaaattgcatcttaactatgtctttttaagtctacataatggcactgacattgataaccttggtaaagacgtgattgcaaaattgttataacatttgtgtgatcagcaaggcacctgttattgagcaatgtggagaaacggtcagttgctgccatacactttccatatttttggaatacttaatacataaatcattattaggagaatgtgtgagaggatatttgtacttttgaaagtcaacataattcagtaaagaggtggtttctttgtcaatttatttggaatttatatcacctatcatttcattgtctgctttatataaataattatacccagagaacaaagtaaccaattaaccagagtcatgccagtgagtccaagccaacttggaagaacagtgctataatattgccatctcattggatcttgaccctgtgggaatctagttaacttccgtgaggaatagtccatactcatttccttttcatattatcatgtattgcttcccccattattataattgactgatttgcatagcacagtagtggctgaaatatcagaagatattctccctttgttgatgaaagtacgtattgcataaccttgtatcttttttcttttaaaatgtttgttgtgaaataatacaaaagtatattgtgtatgtatggtttaaaaaataacatgatcacacgtactcagccttcagcttaagaactagaacattctcag

SEQ ID NO: 97639 - DNA, 13922 bp, Homo sapiens
tctgatccaggaatttcacagttttttttttttttaattctcttaaaaaggaaagggtgattgaagagtaggtcacagtattacttgtaactgtgtacctgtaattaaaggcctgagggaaagagcacacagttcaatgcatgagtattaggctccggctgaagttagctggctcccaggtctctttaggaggctccatacctcacaggtgacatactctttcacatacaacacaactgcaaaagaaagataccaccaaaaaaatacaatgcctgtaggaataactagatttcgcaacaatacaacaggcaagacacaatatatttattagttgtatttctaaaagcattttgatgatatcaggaaatgctcatgacttataaaaagcaggacacaaacactgttaactgtgttcaaggtgggtatatgagaattgggggtgtcccttgaggggcaagtggaacctcagtacacctcaaatctatactagacacaattttatactgtctcagctaaaacacataggtgtcagcttattatcatttccccactacagtcatgcaatcagaccaattttttgctcactatgaaatcaaaatataggctgggcacagtggctcatgcctgtaatcccagcactttgggaggctgagatggacagatcacttgagctcaggagttcaagacaagcctgggcaacatcgcaaaaccccgtctctactaaaaatacaaaaattagccaggcatggtggtagtcccagcaattcaggaggctgaggtggaaggactgcctgagcctgggaggtggaggttgcagtgagccaagactgtgctactgtgcactctagccttggtgacagagtgagactccattaaaaaaaaaaaaaaaaaagaaagaaagaaaaataaatcaaagtataactgcttcttctgtaacaatatctgcaaagtacttaaaacaatacccagcagatgggaaataaaaataaatcttcgtagtagtagtttcttggggctatttgtatttttggctttgtaaaatgcaacccctttactacttacaaaatccaaaataaaactcttaaagtcaacctacatacacaaaaataatcaagagaattttgacaaaaaaaaaaaacagggacgcgagagatttgcgtgcttgatgctcagtgcgtcctctacagctggggtaacgacagctctgccactgctactgaatatgaagctgaacagaaacttcagaaatatacagaaatttagtgtatgccaacgggtagcatttttaaaacatgaaattcaataaactattggggcaactggttatttcacgtggaaaaattttaaagctcaatctctatgttcccaaacataaacaataatatcctccaataggataacgtcaaaaaaaaaaaaaaacctataaaaatactcaaagaaaatataggagggtgtttataatgttgataaagaaaaggactttttaaccaagacacacaagccagctgtcataaagaaagagttgatgataaacacattctgtagagcaaaaaatacatatatttttaaaagccaaaacaggcagtaaattaggagaaaatgctgacacgggaccactgaatataatatggaaagtgccaactgcctgatcgaagaacattaaataggcacaccttggacaagggaaaaaaaaaaggtaaaaaaaaaaaaaaaaaaaagtgaaatctcactattacaacaatcacatgccaatttctgtccattagattagcaaaaattaaagactgataataaccagtattgatacacatgcaggaaggcaggcactcaatctgtgagtatgaacaaatacactggaaggcaatctggttatacagattttttaaatgtgtgttccttctgacatagtaagtctattggaaaaaactgtaaacaacctaaaaatcaacagagaaatggctaaatgacagtattctacactaaggaataaaactatgaggctcttaagtagagaaggttgatatgtggtaactgactacatagtgacatacaaaatattcttaagttccaaaattaaaaggcttatagctatatttatataaacctctggtgcatgtttaaaaatctatttatgtgatacacgatatatacataaacatatgcatatatacacatacatacatattcaggcatattctggaaggttagggttgagggagggtgagaacacagacatatcctatttccatctgtaagtatttgttattactagtataaaagcataagcatgtactattaaagctcaagttcctactggcagctttaaaaatcggactttgggattgaagagaaggcaaactaagggtcacaaaccaggaaaaatgagaatatttctgaataagagatctgttaccaagggactggcagaccctacaacactgccccttaatctggctggctctcttcatcctctccctcttctttgaatggattccatcaaaaccctacaacaagctgacatgaatcccacatggcacatctgtaggatctattctcaatcctaaatttgggctgggtggggtggctcccacctgtaattccagcactttgggaggctgaggcgggcagatcatttgaggcaaggagttcgagagcagcctggccaacatggtaaaaccccatctctactaaaaatacaaaaattagccaggcatggtagccggctgtaatcctagctaccagggaggctggggcacgagaattgcttgaaccttggaggtggaggctgcagtatgagccaggactgcaccactggactccagcctgggcaacagaacaagaccctgtctccaaaacaacaacaataacaaaatactaaatttgtctgtaaactctacttttctaatattaagtcctcacagtgaactgaagcagaacttcctcttgttataagttaaattcctttgacctcttaggttgactctgcatatgctccatgaacagtaaaatacctgttcagtttcactttctaataggttcaagtcaattacttaaaggttgtttttcccctctcatgatttcaactctaaaataattaactaacataaaaatagctgcttacacaaagtttaagaaaacttacttcaacattttaagaaagtttaagaaaacttacttcaacattttaagaaaatgttttgttcccaaaagtttgccaaaaataattttaactcaatgtggaaatgaaaataatgggaatgctacctatccagatgcaccaaaagttcattgttattagaaataaaaaatacttggccaggtgcagtggcttatcctgtaatcccaatgctttgagaggccaaggtgggtggatcacttgagttcaagctggagttcaagaccaacctaggcaatgtggtaaaatcctgtttctacaaaaaaaaaaaaaaaaaaattagccaggcatagtggcacacttctgtagttccagccgggaggctgaggtggaaggatcgttggagcctgggaggctgtggctgcagtgagccataatcgcaccacagcacttccagcctgggctacagagcaagatcctgtcttgaaaaaaaacagaaaaacgaaaaaacaaattgcaccaacaattctgtttacaagtctgagatagaaacttgaggcaaattccaccaaaacatcaagaaacaactaattagattctaataacaatcggataaaataaaaccagaacagcatgtgcacatatacacacacatgcacaaatggatccgtcaatctcacagcagatatttacacatcctaaacacataatttagcaaaatgaatccatcagtggcagaagaataaatgataacccagtagagtaagtccctgaaataacagggtaattcagtcctagaaaatctgtcactaccatcattagatacaggagaaaacctaagaatatcagcggatgctgcaaaagcacaccatcaaattaaaacccactcatgattttaaaaagtaacaaagacctcttcgccagcaaatctggatagaatatctacaactagacatttttgggaatgctcatacttcaatggtgaaacactagaagcactccagtaggcgaagatgacgacggcagtgttctctaccatgttactactcaaaatggtcctggaagttcccagcctacaccagatgagaaaatgaaatggatgcataaacacaaggaaaagcaagtacgaactataattaattcgaaggtagaagactgccgactccaaaatcctagagctctaactgaccattaaaacagtgtccagcaaaggaacaaggtaaacatatgaaaacttagtgattttcctatacaacggcaatcaattagaaatcagtctttttgaaaatcctattcgtaatagctagaaaaacaacctaagaataaatctaaaagaaaacagacaaaactacaatacacaacacacacatacaaatgcacatatacctatacattcagctataaaactttactcaaggacagaagaagacaagtaaattgggagaaataccatgttcagagatgagtatcagaaggctcaacacttcacatacctagtctccaacccaaattaatctagaaattcaatacaatcttcagccatgaaaaaaaaaaatccctactagaatttttcacagaacttgacaggctgattttaaatttcctatagaagactgtggaatttctttaaaagccaatataattttgaagaattacagcaaaggggagggataggcaacttgatatgaaaacattataatgctatggccattaaaacaatgttataaagaataaagactatgtaaattgatcactgaaacaaagtaagagtcagattgatacaaccagtttggagggcaatttagcaggatgtttaagttaaaaatgttcacactcttctatccagctactttctgggcacatgtacacaagacgtgccctagagtgagttcaccgctacaccggacatcccaaaaaaacaaaagctgcagacaaccttaatgtccttcaatggggaagtgactaatcatttaacactgcagaagtaaagttaggaagcaactaagaaagaatgagacaggtctacacacaccacacagagtgatctttagaggtatctagggcatcttgttgatggaaaaagttacatcatatcgtttgtgtacattctaaacacacattggcagtactttctatgttcactatagaaaacatgtatacaaaaccatgtccctacaaatcaccaaagatcttgttaagatgcagattccaattcaactggattggggcggtgcctcagagtctgcatttctaaccaactccagcaagcttgatgctgctgccagtccatggaccaccctgcagacagcaaaggcacaggagatgatgtggaaggttccaggggagaccaacactaagagctgatgaatggggaagagggtggaagacaacagtcaagtgagatggccaacaggagtctttataatgttccagaccagcccgggtaacagtgagacccatctctaaactaaataaattaatttagtatttgttaaagaagagagaggccaggggtggtggctcatgcctgtaatcccagagctttggaaaggcagggcaggaagatcactcgaggccaagagtttgaggctgcagtgagctataatggcaccactgcattatggcctggatgacagagaccctgtctcaaaaaaaaaaaaaaaaaaagaataatgtcattgagtacttgtgtaattaaaagctagtttttaaaaacccatatagactacttttgagtatctccttactaaattctaggagcctcatgatgttaagtacagagagggccaactagtgttgccagctcctctcctcaaacaagaatccataactgaccagaagagagcaagagctgagggaaaataaccaataagctagcagtgacagcctattactactgaagaggtacttttwaaaatgctattttaagtcaggtgctctgtttttatttaaaatagtttaagtctagagagcttattaaaaataaacaactgctagttctatctttagtattatctatgcaacatagttcaggaagtttttacatggtctactatgttttacttttacttcatattcttgctaattaatgcttccagaggaaatccttcttaactactaaagaattaatgagcatgcaaaaatgtcccctctataacgccaactatcaaaaacttctgtcagacctgaaactgaagcttcattagctcccagtaaatggacctctgtacggctgatctgacacaagatgatatgcattgacaagctctttctctatttactgaaggaattgcctgcaataactgaatagacacaaatgaccacttgctatggtctgaatatttgtgtcccccaaaatttcctatgttgaaacccaatccctagtatgatggtactaaaaggttagacttttgagaaayaactaggtctcatacataggagagtggcacaaggctctgccctcatgaatgggattggtgccctgataagagacctggctagtcccttccaccatgtgaggacactgtgagaagggcagagagcagccctcgccaggcaccaatctgctgggtgccttgaccttggacttctgggcccccaggactatgagcatacatttatgttatttctaagcctcccagtttatagtattttgttacagctctccaaatggactatgacaccaggcaagtcaaaactgagatgtgtagattttattatatactaaaacaaaaaagattttagtggaaatggattcatgaaatatattaaaattggaggcaaagtctcaggtccaacactgagtcatcccatacagtcacaacaactgataaaatctgaaagtaactctgacatagttaactggtactagacatataatcacagggagtcattaaagggtaccatgaggatcaaacaacttttaaaagtagcaccctctgagaaggcagaacataatctctttctttaactcatgctagttgagaaatcatttcggaactgatgcctgaactgaaatcttgtgaagtaggagttaggaagtacaatgcaaacaacaaaaggcaaagggtaacccatcacacacttagacaactatgcattatgtcattatcccgtaggcaagggcgagtcataaaggcaaaaataaacacacacacatacaccaagatcaaagtcaaaagccaacggggagaaagtatgtccaagaaacatcaccaaggactaatataatacccctaccatacaaaatatcaccaaggactaatataatacccctactatacaaaatatcaccaaggactaayataatacccctaccatacaaaatatcgccaaggactaatataatacccctaccatacaaagtatcgccaaggactaatataatacccctaccatacaaagtatcgccaaggactaatataatacccctaccatacaaagtatcgccaaggactaatataatacccctaccatacaaagtatcgccaaggactaatataatacccctaccatacaaagtatcgccaaggactaatataatacccctaccatacaaartatcgccaaggactaatataatacccctaccatacaaaatatcgccaaggactaatataatacccctaccatacaaaatatcaccaaggactaatataatacccctaccatacaaaggatcaccaaggactaatataatacccctactatacaaaatatcaccaaggactaatataatacccctaccatacaaaggatcaccaaggactaatataatatccctatcatacaaagtactcttaaaaactggcaatcccacatctaagaaactatcctgaaggcaggcctccaacagtataaaactacacatccacaagtttattcattgcaacaccgtttataattacaaacaccagaaacattctaaatgccatacataggagagtggttgaataaactatggtacatccacacgaaggagtggctattttttaaaatgaagatgatctttaagagctgatgtgagtgatttccaagacatattgataagtgaaaaaagtcaagtgcagaagagtatcttataccatactacctgctcttttttttaagaaagataatgcaataaaatacatatgtatctgttgatttgcacaaaacatacatgaaagacaaactagaaactaaagagactggtcacccacagagggtgggtagaaaaggagtggagggcgtacagaatgggaatgggaaagctggaacgaggaggcttttctgagtgtataccctggtgcacagctctcacgcttggaagccacatcaatatttcacacatccaaaacacacaatgacaatcaaccaggatgtgtgtatggggaacaaaaaaatggaatccaagcagtaacaaattaatctaactcaattacaaatgaataaaataaccacattgaaggaggtgaaaagaaaaagcaatcttggaaaacagtattttgactgggacaccataaagctaaagacaaaaagagccgtacacaaaatctatattcttggactttaagagtcagcaaaccatgtccataaagggtcagacagtaaagcttttcagctttggaggccatatggtctctctcgcaaccatgcgtgatatataaacaaataggcggggctgtgttccaataaaactttatttacaaaaacatcaagcgggccagattgaacccatgggctacagttcactggcatgtgttctagttaataaagctgcttctcagagggatttgggttagcaaatttgaaactactttgatgttatactagagttgagcaaatgagtaaatgtattacagacagcggagtatggatttctcactgctggagaaaggagttaacaattaaggaaaagaagaaggttagaatgaatgctatggtgttaaactggaaatggaattcatcaataggaactcatttttaactgcatatgcagagagatccatatatagatgtgcaggtttgtgtgggctaagatacaggcatgcacttccaagctttgtcctcctagaggttcgagaggcaacggcaacaagcacgtgttgccccgcatgtgcatttctaaatgccgtttgccaataaaatgaaacagtgctccctcaagtgcctgactccagagctggagcaaagaaaattcaagatgcaccctgagtgtcctgtggtagctgaaaataagaaattgggaaaacatgatgaaaggacataggacccaaactgcaggagcttccaatgaccaaagctacgacaatctgagtaacagaataagaatactggattataatacatagagttaaaaaaaaatctaagtgcataaagacataaatgagcccggcgcggtggctcatgcctgtaatcccagcattttaggaggtggaggcaagtggatcgcttgaccccaaggagttcaagaccagcacgggcaacatagcaagaccctatctctacagaaaaaaattaaaaattagtcaggtgtggtggcacatgcctgtagtcccagctactcaggaggctgaggcaggaggattgcctgagcccaggaggtagaggctgcagtgagccacattcacaccactgcactccagcctggatgacagtgcaagagcctatctccaaaaaaaaaaaaaaaaaaaaaaaaaaagacatgaatgaatgatatacagagaaggaatagcttctccttgcaaaacaactccaattagcaaatgtggaagaaacaaaggaacagacaatcaccattaggtaagcaccacagaactgctgcaggccaatggaatgaatgctaaagatgggtaaaagttcaaggagaaatgccctattttcacagtctcaaagttatcgtccccaagatatgtattaattacaaagtgaaaagtagttactttatggtggaaaaacttggcagacatccccgtaaccaagtgattacagttaatatcaccagtaattagacaacatcatataccccatctataagcgacccactgaaatgtatgggctgagctgcagtcccctaaaactcctatattgaagccctaaccattataacctcagaatgtgaccacatttgaagacaagagcctttagtggggtgactgagttaacatgagatctagagggtgagccctaatctaacatgactggtgtcctcatacgaagaaatttggacacacacagacaccggtgcacgcacgcacagaggaaagagcgtgtgaggacacggcagagagatgtcatccacaagcctctgagggaaggaagccctcgggagaatcccatcctgcccgcaccttgaccttggaatgcaccctcagaaacagtgaggaaacaaatgtctgttgcctgagccacttggtttgtgtattttattacggctgcccaaggagactaacacagaaggacacagtgttgtgtctatggaattctggccaaaaatgtactaacctgacagaaaaccagaatttaggaacattttacaaaagaacttaaaggcactctttgaaagtgtccagatcatcgaaggaaagactgaggaaccgtcgcagaaggaaggagcctaaagagacaggatctgaatgcaatgctgggtcctggaacagaagaaaggcattcatgggaaaacgtgcagtgtgaatacagcctgcatagctcctcccaaagactttcccggttttggtaactgtgctacaatgttacagaagatgttaacactcaggaagttggaggagtggtatttgagaatgctgtatcatttttacaactttgctgcgaaactctaaaactactgcaaaataaaaagttgaaacactttctgtttgacagccatgaagatcctctggtagggggatgccagaatgaatttcacattttggaaagatggctctgggagcagcgtggaggaggtgtgaaggtgctgcttctcagatgcagacctcgccctgccctgctctgaaatcctgggtgacgcttgatgccaggctttgccaacagagggtgctggagggactgcaagcattccttttcttctccagcatgtggttttccaggtggcacagccggtgggtcggcatgcagggcccctcctgctgacctcagaggactttgtggatggccactctgtccagcactggcaggtcttgcgtccctgcggcatgtacacccgctccctgcggtcgaatctcagcagcaggcaggctgcgctgctctcagctccttcctcatgctcctgcgccagcggcttgctgcagctgcccctctgtacacatctcctttcagcccctctggtgagttttacatgtccacttgactgctgaagggatgcccagatgggtagctagtaaaacattatttctgggtttgtctgtgggggtgtttctggaagacactggcatttgaatcagtgaactaaggaaagaagagccgccctcttaagcctcttaggcatcatccaatccacttagagcctggagagaacaaagaggtagacagaggaagggcaaatcccctttccctcttcatgagccaggatccatttctcttgccctcacacgtcactgcccctggttcccgggccttcagtctcccactgggactttacgccactggctcccctggctctcaggacttcgggtttgggctggaactccaccaccactttccggggcctccagcttgcagaaagcagatcatgggacttctaggcctccatcattgcataaacaaatccctataataaatctggttctatatatctctctctaacctatgggttcgtttctctggaggatcctaaacacctctccaacaattctatgaaatttccgccattcgaattaccagtgtggctctgagccctgatggtaccttgcctgattcgagttctaacatttctttctactttcaagttctaacattctttctaccaagcatatgcttttttttcccccaatggggagcagaatagagtttcactactaagttacttagattacatgagttcccatgtttggttctaaaagtttctaaaagtaaagcaaaacttactcttaagtttagagtaaaaagctaattcactgactgatgagcatatactagtttttagtgttttgagatcaatggtttatatattattcctattcaaaagcaccatctagtctgttttctgggtttttgttttttggggtttttttggtctgatttagaaatctgattcaaactagctaacaccgttaaccatgcagctactatgaacaatttctccctctttcttctcttatttaaaacaagtgtaacctggaacactcagataaaagtatagaaatgggacagatgcatgcgctacatgggccaagagttctgtgacattttccacgtttgtgttttaagtgatggactaaaaaagccttccagttattaagtctaattactcttcttgaatgttaatttgccattaaaagacattttttcaaacaacctaaaatttccaccactggtcatgagtaggagaatggacccagacggacgtgcagacagttccttttagcagcggtctctatgacagtcaagtttgaaaaacagtgccagggtctagaaaccgcagagcgagggccattctgttatttacagcagtggggcgagagtgatgagcaaaataagcctccaaggccatcgtttcctactgatggggaggaagagcagggccctgggcatcagagaacaagctctctctggctcccaggccactggcctggagatgcggtcgtaagacaaaggtctttattttgagatctgaactgtacttctatttcaacacttaaccaaagactcattctcttcagctctaaaagtggtgactaatgcctgccctgcagtgatgtggggagcctaggagctaggttcttaggcagcgccccgcacttcaacatgactgaataatggccttctcttggtctcaggcccaccattctcgtgggtgaaactggaggttggctgactgggcgaggccactgcttaggaccttcctcctgtaaaacagggggagtggcctcagctctcccagacctcataacacaagtgttacacttttcctcttacttctgtccacactggttagtctgtaaataactgacagcccaagtttcataaaattatggaccttgactggtttcctaaagagagcaaactcttaaaacatgcacggcaaacaaagtattttaaaaatcaaaaagacttaggagagcaaaaaaaaaaaaaagcacgctacgccatgagacacataagctatttttaaaaagaaaagttttaaaaaatataatttacaccaccaatataaggacaaaggtacccccaaaattcctcctagtacaaaaaacacacatacacacatagagttggataaaatatcttttaactacttttaaaaatacatcatttacaagctagaatgaagagaagtcatcaggaaaataaagatgaaaactaaaaaaaaaaaaaaaaaaaatcaggaaagtgagccaagtctgaagccaggagatatcccgaggccacgtgctgatgctggacagggacacagagccacagtgacggggctgtaaggtcagattagagcccacgcagacaggcaaggtcaggggctacactctcaagtgaaagggcaaccagggaacagagcccacacctgtctatcgtctgtcaatcctgttactggagaaagttggtgagagaatcctgaaagaattctcatccatgccccaggcttcagagcagg

SEQ ID NO: 97640 - DNA, 29074 bp, Homo sapiens
  misc_feature (1)...(29074): n = A,T,C or G
gcaggggatgagttaggaagctatcaatatcaaatgagccatggtttggtttttctaagatactggcagtgaaggtggagggtggggcctaactgtggatccacagtgctttgaacatggcacctatagaatttgttgactgacaacatggggggacaccagtcacaaaagtttttttttgtttgtttgttttaaatagagatgagatgaggtctcactatgttcagccaaggctggtctcaaactcctgagctcagcggctcaactgatcttcccaccttggcctcccaaagtgctaggattacaggtctgagccaccacatctggccacaggagttttaaatgaggaacttttcagaggagagactcatgacagagggaatgagacttctaagtactttgttgtagagaggagaaagggtggagaatagacttacaaagccaattatgaagcaggcacaaagagagtattggccagacaggggttagcgtcattttttttcttttcatttttttgagatggagtttagctcttgttgcccaggctggagtgtagtagtgcgatcttggctcactgcaacctctgcctcccggattcaagtgattctcctgccttaggctcctgagtagctaggagtacaggcgcatgccaccacgcccggctaatttttttttttgtatttttagtagagatggggtttcaccatattggccaggctgatctcaaactcatctgcccacctcagcctcccaaagtgctgggattacaggtgtgagccaccacacctggcccagtgtcatattttaaattaatctaaacttacaggaaattgagattctatgaagtctgtttactgggaatggcaagaaagaggggagatgggagtctctctaaacctattctggttccagaggctgctcaattcacacaaaaaagagaaagaatgaaacatggggggaagaaatggaagaactagaggtggagactttcagccccagaattttaccatgtggaagtttttgtttgtttttgtttttttgagacagtgtctagctctgtcgcccagactggagtgcagtggcgtgaccttggctcactgcaacctccacctcccagattcaagtgattctcctgcctcagcctccggagtagctaggattacaggcgcccgccaccacgcccggctaatttttgtatttttcatagaggcgggccatgttggccaggatgctctggaactcctgacctcatgatccgcccgccttggtctcccaaagtgctgggattacaagcataagccaccacgcccagactcaccatgtgaatgtattacactgacaaaataaacgtgacaaaataaaactgcacattgataagataaaggtgtaattattggaatagtggtagtgttctagtactttcttaagcaaaaacatgggtaaatgatttcataagtgcaaattttttacaaatacatgtgttttagcttttataaaaattgcagaatataacacatccaaaaaagagtctaaaatataaatatacagtatcaaaaaaattctccaccactacccaggccatgaaaaagcagaacgccttccagagtccttcctttctccccaggctctgaactcctaaaattacaatactcatttcctttcataatatatatatatatacacacacatatatatacatacatgtgtgtatatttacatatatacacacacacatatatatattttttgagacaggttcttgctctgtctcccaggctggagggcagtggtgcaatcacagctcacagcagcctcaacttcccaggctcaagggatccctggctaatttttttttaaattattttttgtagagactgggtattacaatgttgccagagctggtctcaaactcctgggctcaagcgatccccctgccttggcctccaaaagttctgtgggattacaggtgtgggtcatcgtgcccagcctatatttttatttataacgtttgtatgcatctgggaaatttcatagaaatcttttcaaaaggaagtttagtgaggtagaaagagtgcagatttaggagtcagaaaaaccaattttgaaaggccaggcctgctatttactaagtgtgtgactttgggcaagtcagtccccctcctccaggcctttttctcacctgtacatgcagatgagaccatccacgggttccaggactgtcgcaaacattcaaatcatgaacatttatataccaagtttattgagacctcctgagacttaaaccctgtagaaaacagatgaatcaaacccaggccccattctcgggaagctcacagtgtgaaaataggtaactacaaaaacacagccaataagtgctttgaaacaaggaagaacataaaaaagatgtagtgttcgaaaacctggaatcaaaaactaaccgcggagaaaggtaggaggatgttctagactcccagagaagagctggggaacatccagaaaggctcttgctgccgacacagccacatcccctaggtctctggagttcactgcaggctggcccattgcagggaggtgtagaccaccttaccatcaggctgcggagaacagaggagcagggtctttctgacgctggttccaaggcgcccagcagcaaccaggtcttggagtgggatggtgtcctcaggggcccagcactgagcgatataatgggcgtggaagcggagggggtcacctgggggaaggagagaggcactgaagcagtgaccaatggcagacggctggacgccacgggaacgaccactgggaggagatctgagatcatttcagccatcactatagatactctaaaacagatgctcttggacacaactattccacttctaggcttttttttttttttttttttgagacaaagtctcgctcttgtcccccaggctggagtgcaatggcacgatcttggctcactacaacctctgccccctgggttcacatgattctcctgcttcagcctcccgagtagctggaaatacaggcacccaccaccacgcccagttagttttagtatttttagtagagatggggtttcaccatgttggccagactggtatcaaactcctgacctcaggtgatccacctgtcttggcctcccaaagtgttgggattacaggcgtgagccattgcgcccagcctgatgtctaactacttctaagtgaatcttctggatcacagtaatcatttaataaaagtcgttaaactgcttgcccaatgagttcgggagctcccaaatgtttcctgtctgtctatgaatttcagaggctaagagaaagtgagacaaaaaagaaaaatgcagctgggcctataattccagcactttggggggccgaggtggaaggattgcttgagcccaggaatagggaccagcctaagcaacaagagaccccacctctattaagacaaaaaaaaaaaaaagaaaaacgcagaatacattgggatcgtatggaaaggcacagcaaccagaggccccaacccatactcaccaggatagaccaggaagtcacctccgaacttgccagccgcactgaggaagaagcctcgctcccacaggtctctgtagatactgtagcgcagctcgtgggcagggcggccggcgtggggccagtctttagactggacacgccagtccaggggcctggccttgaccggtcgaggcctggcagtggccagctggacaaggagagcagatctgggcaagggggctaccccatttgagggtcctgcttgggaagacgaggggcctggtggggagtacagagaagagtttggtaaattcaaggggtaaagtcttctcaccctcagggagacccaggcactggattcccagctaaaattcctaaaagatctctcctctccttcccgtggtccctggactccacctcccatgctcaccagcttcctcctgctctcccgaagcctggccatcactggtctcatcctctttggcagcctggctcgagccggcctcctggcttgagctggcccctgaagcctgttctagtttctgcttcttagcagcctggccctccgtaatcttctccaggagctcctgacgacgggtctcccgggcctcagctgccaaggcgctctgctcctggaagctctcctcttgctggcgcttgaaggatgtcagggcctgagaagcacacttcgctggaacctccaagcttatggtcccttcagaagccaggaaacttgactcccaggtcccgctcccaccgaacccgagttcgagccccgcccccttaccaggctgtggtgccgagagtctggacgcggggcgctgaccagagtcacggcgccgatctcggccaagagccgcgcctcttcgggcatcagcagcagcgggaggcccaggcgcgagttctggcggggcccgcggggcagggcgcctaccgtgcggccccccacacccaggcgctcccggagggcctgcaccgcctcggctccccacaccagggagcggccgttcgccacctccaccaccagcatcctcctgcgggagccgggaggcaaagcagttaccgaaacagctgcgcgccgcggaccgctgcagcgcacccaaagcctccggggtctcggcgaagccccgcccctaggcctcagggggcggggcctcgctcagccgccgttcaccacctgctgggcccgagcgccaggccccgcccccgggcgatcccaccaggcctcgcggccgccggagacgagacgccggagacaagcccccgaccctctcccctcgccaagcccccagggtcccgctctacccttgtgaccctgcggtcggcacccgctctgtgcccgcactgccgtacctaccattgcgccttggagcgtgaaaaacaaacctccgcaagcgcggcgacacgcccccttacaaaggtccattttggcaccaccctcttgcaaagtgggcgtcccccttcgggtgttcccgtcagcggtcagaagctctggaggctaaggcaccgccgaggccacaccctcttccggacgctcgagccttcgctcctcctctttccgaacgactgtgattcggctttcggacctcctcgctctcagactcccacagtacaaaaccctgccccctcccgagcacaggaagttcggcgttcgggcgtcctcggctccaccgaatccgcagccccgcccccttctcgaacgccagcaatttgacgttcgggtgttctcggctcggccgaatccgtagccccgcctcctcccggacgcaataggttcggcgttcgggcgtcatcggctcccggcagcctcgcggcctgtggccccgccccctccgagcgccagcgcaccccagttggggagttcccgccctacgaccgaaccccacagccgaaagccccgccccctggacacccgccgtccactctccgctcgggcgggctcaccccaattgggagcgctcagtccgcctccttgcctcccttcagaatgtcccactgtccaccgatagaaccagcgagtcacctcataaacagtaattcgcagtcgaggtggagccacccactgcgcaccgcgccacgcgctccttgctccaccccctcatgccgacaccctcgtcaacttcgtcatcccgccccatcagcgccgcgggaagtcaggtcccgcccctcgcaggaccgaagccccgccctcctcccgcgggggccaccttggctccgccccactgagcgcacctccctctgccgcttcctctcctctacttgggaacttgaggatcgtcaccctggcccggtcccgtaggcgcacgccggccctcggggttccgcccctttgagggcaagtcgctttcgccccgcccccttgtaaatactcatgggtatctggcgaacctgttgactccgcctatcatcctagcgtcacttgtacccaactatctacgaagtaaaccgaagcttgtggccccacccacatccggccgagtctgtggscccgcccacatcggaacagtgaccctaaggactcgactacctccgaagaaagccgaaacatgtggctccgcccacastggcctcagctctccgttctcgactattgccgaagtgagccgaagtttgtggccccgcttccggagaactcaagctcccgattgtgcccgaaggaacccgaagggagaccccgcctcattcctcacgscgagctccagaccccgcctcctttccrgagcccgtctgttccccttcgggtccaaagcttttggctcctccttgttccgagcccgaaggcccgccccttcacgtactcggagctcggatcccagtgtggacctggactcgaatcccgttgccgactcgcgctctcggcttctgctccggggcttcttccctgcccgcccggggccctgaccgtggcttcttccccggcctgatctgcgcagcccggcgggcgcccagaaggagcaggcggcgcgggggcgcgctgggcgggggaggcgtggccggagctgcggcggcaagcgggctgggactgctcggccgcctcctgcccggcgagcagctcaggtgggccagggtggcggcgcccagtggcgaggcgaggttacacggcggcagggtctctgcgggctggcgggtgcggggcggccccggaggcgcgttggaactcggggctggcgcaaccgcctgtggctctgccggggatgcgctggggtgcgcgggacgggttggggctgggcctgggcctgggcctggggaggggagggtgttcgatccccgggttctcagtaggagaggggtgtggagctccgaaggaggtgcaggttggagacccgggctcctctgggtggtctcgaagaagggctggggggtccggatatctggtttyacaagggccgggggatgggrgatccaaagagggggtctgggttcctggatcctcgctggaagagggggctcggaggtctagattcctgggctgtcgaagaggaagggtccgggaggggtgccgtttctgggtttttaaaagaggggcgtcttcaaatctgggtccccagtatgggtgcgkggagtagctttgatttctgcgttcgcaaaggaggggcttgggtgctgggagatccccacactttcctgggttctccaaggacaggagagctggaggcctgtgcgctcaaaggaggggctgggggtggattcctgtctcctccaaggaggaaggggctggagtcygggttgctaggttctcaaaggagaggagctgaggctcatactccatcatcctcaaaaactggggtctagaaggctgggttcctggatcctcgaagagggaggaggcagggggcctggattcctgggttctcactgtgaatctctgcccctcccccagaccatgtcgcctgaagaatggacgtatctagtggttcttcttatctccatccccatcggcttcctctttaagaaagccggtgagtcaggctccctccccagtggaaaataaaggggggggaccctctggaaggttccaggcttatgctgtcccttccccctgcaggtcctgggctgaagagatggggagcagccgctgtgggcctggggctcaccctgttcacctgtggcccccacactttgcattctctggtcaccatcctcgggacctgggccctcattcaggcccagccctggtgagaatttggtggagggaggagagggagaggaggggagagggggaagcaacctgtttcctctttgagtctttttcagcttctgcctcatstctagctgtctcttgttgatcagctcatttctctgtttcatgtttgtttgtttgtttgtttttctttctttctttctttttgagatggagtttcgctcctgttgcccaggctgcagttcagtggcacgatcttggctcactgcaacctccacctcccgggttcaagcgattctcttgcctcascctcccaagtagctgggaytacaggcatgctccaccaygcctggctaatcttgaatttttartagagmyggggtttctccatgttggycaggctgrtctcgaactcctgaccttgtgatctgcccacctcagccttccaaagtgctgggattacaggygtgagccaccgyatccggccttcatctgcttttctttctcccctgccttctgcgtctggtccctgtgtgtttgtcccagtccgctacatccatgtcatggagagaggtggacagtgtgtctgctggcctggccaccgttcatattcattcatatccacctctctcttcttgagccctggacctcggaaataaagaaaaagtggaggattgcagggtcttcaccygaagcttctcttaacctcattctctgttggtgtgtgtttctatgtggctgagcctcttctcccactgtttcaatcatactcattcggtccctrcatccaccctcctgtcctctctgcccttctgtgtttctgtctctaaacgaatggggagagctgggggaggattggtggctggactcgtggagtgartggccaaggccgagacttctgtgcccaacacagtgcgcctcctgcttttgcccagctcctgccacgccctggctctggcctggactttctcctatctcctgttcttccgagccctcagcctcctgggcctgcccactcccacgcccttcaccaatgccgtccagctgctgctgacgctgaaggtcagactcggggcttgcmactcccctccagcctccctgtgggccccttcacctcccactttacctcccccttcagtggctccccgggattttacctccaacacaccctgggggtgggacgtcacctcacttgctgccctgggcacagcattccccattcacrtgcccttgggcaggtcttcacctcccagctcctcctggggtgaggaaataacccacatagggtaacagtaggtgccattgggtgcttgcggtgtgccagaggcccagctgggtggtttaccaacatgctgtccttgaatctctgtagccagctattttgcaaaggagaaaaaccagctctggggagaaggtacttggtgaagggaacaaaactagggcatccaggtctggctcctaatcacctgggaagaggggtaaaaacagaatcctagggcccaccccagacccacagagtcatggtttcctactggcggcttatccgtgaacacagcagtcatgctaggtagggagtggccttcccagcattcagtgtgccctgtgggagctcagtggtggcaggagtaggttggatgagagaggggttcgtggaggagcatttcaggccgcaggatgtgtggaggggagcaggctgggttccacaggctacaccagccacatccactttctgggacgagcaaaagggaacaggcagcagggctgacaccgtgctaggcctggctggagaccgtgaggacattggacttcttcccgtggaggattgagatctgctggaagaggggatttttggtttgctgccagaagaggcaatgtgaccagttttaaatgtttaaaaatactcgttctggctgggcacagtagctcacgcctgtaatgccagcactttgggaggctgaggcaggcggatcacctgaggtcgggagttcaagaccagcctgaccaaaatggagaaaccctgtctctactaaaaatacaaaagattagctgggcgtggtggcacatacctgtaatcccagctactcgggaggctgaggcaggagaattgcttgaacccaggaggcggaggttgtggtgagctgagatcgtaccattgcactccagcctgggcaacaagagcaaaactccatctcaaaaataaataaacaaatagaaatactcattctaggccagctgcgggtggctcacgcctgtaatcccagcactttgggaggctgacgcgggtagatcacctgaggttaggagtttgagaccatcctggccaacakggtaaaactccgtctctactaaaaatacaaaaatgagccgggtgtggtggstcacacctgtaatcccagctactcaggaggctgaggcaggataattgcttgaacctggaaggtggaggttgcagtgagccaagatcccgccattgcmctccagcctgggccttcccgggcaagattccatctcaaaaaaaaaagaaaagaaaagaaagaaaactcgttctggatgctgaaggagaattgaagtggaacagggcaagatgggatggactcagataaagggatcctcctttgtccgagtccaggtgacaaactgtggtggcttgatacaggccgttggctggctgtgggtaggtctgagttgcagcaggaaacgcgcatttaggatgactgaaggagtggccaccaattgggcaggatgtagaagagcaagaagggatggtgcctgaaccccagcccsgcagaaggagccgttcccaaccctaggcccaggggaaatgggtcaggttgtggtacctggatggaaaaagggttgtgtaggcctggtgcagtggctcatacttgtataatcccagcgctttgggaggtcatagtgggaggactgctggaggccaggagtttaagaccagcctgggcaatatagtgagaccctgtctctacaaaaaattaattttttaaatgttatttatttttaaagatggagtctcgctctgttgcccaggctggagtgcagtggtgtgatctcactgcaacctctgcctctcgggttcgagcgattctcctgcctcagcctctcgagtagctgggactacaggcgcccaccaccacgccttgctaatttttatatttttagtagagatggggtttcaccatgttggccgggctggtctcaaacccctgacatcaagtgatctgcctgcctaggccaaccaaagtgctagtgttataggtgtgagccgtcacacctggccctaaattttttttttttttttttgagacggagtttcactcctgttgcccaggctggagtgcaatggtacgatcttggcttaccgcaacctccgcctcccaggttcaagcgattctcctgcctcagcctccygagtagctggaattacaggcactcaccaccatgcccggctaattttttgtatttttagtagagacagggtttttccatgttggtcaggctgatctcgaactcccracctcaggtgatccgcctgcctcggcctcccaaagtgctgggattacaggcgtgagccaccgcgcccggccaaaattattttttttaaagggtgtgtagagccacccaccttgaaatgatctatcaagggtgacagccagcccaaggccatcttacaagggaataaaagccctaccctccctctcctgactttgtctccagccagggatttctactgacaacccagccacaagctggaagaaggagatctattgatatagggtggaccttgggactggtgggaaagggtggagagtacaacatattcagctcagtagtggagatggaaagaggcaacagactcaaacttaagggatttcaaggcgggcagatcacttgaggccaggagttcgagaccagcctggccagctgaggcatgagaattgcttgcgcccccaggaggtgggggttgcagtgagccgagatcacaccagtatactccagcctgggtgacagagcaaaacttgtctcaaaaaaaaaaaaaaaaaaaagagagagagattaaaggatcggatttggggagtgagggagatttttggcttgaacaatttggtggcctgttgtttgaggggagacactagaagagggtctaccttgtggggtgggtaacatcatgttccgtttccagtgcgtttggggtgcctggagacatccgagtataaatgccaataagccacttgattggataggtctggggctggggtagcgtttgggcgtcctcagcgtgtggatagtatcgaaacctccgtgattgcgtgagagcaggtaagcacagaacagggaaaggggaggagggcctgggactgagccctggggaacaccgcccagctagaggcgttacacacaacctagatgggcagagctgcgggcacccagcaccccttggctgccgagggcagccgcgcaagggagatgggtgtggggaagggcccagagtctgacctggccccttgcccacccccttctgcccagctggtgagcctggccagtgaagtccaggacctgcatctggcccagaggaaggaaatggcctcaggcttcagcaaggggcccaccctggggctgctgcccgacgtgccctccctgatggagacactcagctacagctactgctacgtgggaatcatgacaggtgagtggggctgccctaacaactctgccgctctgtctcctgtgtccccttccgccctgagtgcctgttstgtgttcccgccctgcccagggcaacctccatcctagcatctgctgctgtgagggtgggcatgtgtctgggtctacgtctcacacctccgctggaccagagctgctttggggtagaagctggctgtctcaacctaagcaattccttgctcttctccttgtagcgtattgggagcaaagagaagagataaaggaggtaaagatctatgtcaacctgatgtttttgcttcccagacaacaaatattcacggcttagggtccactttcagcttaaggaaatatttttcatctgggcgtgggggcttatgcctataatcctagcactttcggaggctgaggcgagaggattgcttgaggccaaaagttcaagatcaacttggccaacatagcaagatcccgtccctttattttaaacctttatttttaaaaaataaataaatataaaattaaaagggccgggcgcagtggctcacgcctgtaatcccagcactttgggaggctgagacaggcagatcacctgaggtcaggagtttgagaccagcctggccaacatggtgaaaccccgtctctactgaaaatacaaaaattagccgggcatggtggtgtgtgcctgtaatcccagctacttgggaggctgaaactggagaatcgcttgaacccacgagacggagtttgcagtgagccaagatcacaccactgcactccatcctgggcaacagagcaagactccatctcaaaaaatacatatgtatgtgtgtgtgcatgtgtgtatatatatgtatgtgtgtatgtgtatatatatgtgaaattttaaaaagaaaatatttttcattaatgtttacctcatcaaaggttttttttccaataacagctttagggaactctaattcacatactcatccacttaaaacatacaactcttggcttctttaatttcctggaaaaaaaamaaaacacaaaacatacaactccctgatttttagtatattcaccgagttgtgcagacatgaccaytgtgtagttatattcagaacagtttcataccctgcaaagaaaccccatgtccatcatcccacaaacctccatccatccctggtaaccagtaattgactttctatctgtaaagatttgcctgttctggacattgcgcttacaaatggaatcatacaacatgtggtcttatttatttattttaatttgttttttttttccttttatcttcccatgctacattgacctaaacatacggcctttgtgaacatataaaaattttaaccccggtcccttctgtgaatcacactgcttcctccctaggccagaccaccatcatattgtagctaaagtgccacagctatctcctagtttctttccttcctccttccctccgtccttcccttttcccttcttccttccttccctccttccttccctccctccttccttccctccttccctccctccttccttccctccctccttccttccctccttccctccctccttccttccctccttccctccctccctccctcccttctttcttcctttcttccttactttcttccttcctttccttcttttcttacttccctccttccttaccttctcaaattcctccatcctttactctcttcctttaataacttccttacttcccttctttcaatcttcattttccttttattgtcctcactcatttctcccctcatttgatcttactcacctctcttactctctctctctacccattcccttcggcctccatgcttttgtaatcctctcgctctctcccatcccgctgtgatccacctcttcgtatctcccgtgcggtgttctctttgctccgtcccccgcttcttctcccttctttcttcttggctctttactcccatcaacgcttacggtggtttacattcttcgtttctgcctcgcctgctcacgatatgttgatgttttcaatctcaacacaactcctcttcctactctaggctttctctcaactcttctaatcgctcccgcatcccactctgccgattgtattccggcacgctctctgcatttgtcgttgacatcgttgctttctctgcactctcgctccgttctgcgtctgtactgtcaccatttgctaagctccnnnnnnnnnnnnnnnnnnnnttccttcctccttccctccttccttccctccttccctccctccttccttccctccttccctccctccctccttccttccctccttccctccctccttccttccctccttccctccctccctccttccttccctccttcccacccttcttccttccctccttccctccctccttccttccctccttccctcccttctttcttcccttcttcactccttccctccctccctccctccctccctggctggaatgcagtagctcagtcactgctcactgcagcctgggctcaaacgatcctcccgcctcagcctccccagtagctgggaattcaggtgccctccacacctggctgatttttattttttgtagtgatggggtcttgccgttttgcccaggctgctgtccaactgttgggctcaagcagtcctcccagctaggcctcccaaagtgctgggattccaggtgtgagccaccgcaccggcccctctgtctgtttttctgttactgtctctgtctctctgagtttcttgtcccccctgtctctcgttccttatccccatctctcagggtctcagtccctacccttggggtctccccggcgcccagtctctgcccctctcactccctcttcccaccttccttccaagctccctgtcctcctcctgcagacttgagctctgcccacctgcctgtctgaccgcggccctccctccccgccccacaggcccgttcttccgctaccgcacctacctggactggctggagcagcccttccccggggcagtgcccagcctgcggcccctgctgcgccgcgcctggccggccccgctcttcggcctgctgttcctgctctcctctcacctcttcccgctggaggccgtgcgcgaggacgccttctacgcccgcccgctgcccgcccgcctcttctacatgatccccgtcttcttcgccttccgcatgcgcttctacgtggcctggattgccgccgagtgcggctgcattgccgccggctttggggcctaccccgtggccgccaaagcccgggccggaggcggccccaccctccaatgcccaccccccagcaggtcaggcggcgcgagggaggcttcccaagacccagcagcccccacctccaagggctggctctgcccctagccgggaggagagcggggagcaaggggccagggccaccacctttttgagcagagtgtcgccccctcggcaaccatggcctgccagcccctgtcggtagggaaaagatccctggtactgacagatgccccttgttgctagcgcttgtcaccccgcagtgtggtgaactgccccctgtcgctaggaaaaggtggtaacttagcaaccctgtgccacccctctgttgccacagaagtgtcaccccccagaaccagattgttcctgcttgctggggatgccatcctttgctagtggtgggtcaccctctgttgctagggaaacggttccctagcaacagaacgccactatttgctagggaagcaggatccctagcaacagtagctcacctcctttttaccagaagttttgctctgttgctgcagatacggcactccctgcactgcccctttgttgctaggagctagcactgctccaccccgtgggatgtcctcacatagcagccctcagcagccctctgcaaggaaatagcaatttccaatccctgaccagtgctgttccccagcagagggcacgccattcctaccaactacagttacactgttgctaaggaagccaaacctccccctggaaactatgggttgacccttgttgccagagaggctccaccccccggcacctgcattgctaggcaagtcgcacggccatagctgtggactctcttgtggctgaggaagtattgcccccgtgttgctagggagatggcacccccggcaaccaggagtagactgcccttgtgttcctgacagctgcagtcagccttcccccaggggcttggactgcggctgggggaacagcctgttgatgtaaatgatgaactactactccctgctagggttgtcccctagtcgtcacaaactgccattctgttgtgggggtagtgacacccccacgggaatttgttaccactgccctaataaccgtgccctgacctccagctgctagagagaggatgtccccctagtaaagccaagcaggaattgaaggtttttctaaatctgctcggtcctcactcctaaaggatggctcccctcctgtcatcagaggccaccaaggcttcatatgggccagtgtttcccactgctggggctgtcgacatgagtgatgagggagccactgtattgctagaggtgacacttctccaataatcactgcgaccaggaaaaaagccccttcctaaaagcctttctaaacatcctaggcattgttgctaaggaatgccttttccttagcaacaaagatcatggggaccccactggcgcctggaacatctccctagcaaccgtgaagcaccttgttattagggatgataaccacaacttccctggcaactgcagtgtccgacaatttagaagggaccatccttggcggcttctctgaatatactgagyttggttgctaaaggactcatagcttagcaaccatagcccttcaaggcttttcatggctgtggcgggccccattaggtaccaaaagaagaagaaccccattgtcagtgractgtaccacccagcccacccaccttcctaccctacaggcaccctctgggccaccctcccttgctgccctagcaagtctgacagccagagggccattgcctggccaggatcccttccttagcatccggggctgggacactagcaggcgtcgggagggggcctggctgagctgcatgtctgtcccccaccctcatcctccaccccccagtccggagaaggcggcttccttggagtatgactatgagaccatccgcaacatcgactgctacagcacagatttctgcgtgcgggtgcgcgatggcatgcggtactggaacatgacggtgcagtggtggctggcgcagtatatctacaagagcgcacctgcccgttcctatgtcctgcggtgagtgagcccgcccagtctcaggtgacactgcagaactacatctcccagcaggccccagggtagcctgcagcgtccctggctgggcccctgcccccggaggctcatgggaattgtagtttgtttagcctggttttgccctgcctctaattatagtggcagcatgccggtgtaaaatcgttccccctctcggggcctcagttgctacttctgtaaagtcagcctcactcagcagaagcaatgtactgagtcctgtggactcaatagccagccttcctggaatcttggccgtccaggttatggagaaaccttgaggagttagttgacctcttagttgcctcaagtgttgaatggagtgaatgctatttattactggtttcataggtagatagaaggactaaatgtgataaaatgtgaaatgtatttaatgtgaggcctgacaggtaagtgcgtgctgtgtattcatttttattgtttttcattcttccaatatttctcgagtggagactctgtgcttgacactgttatctgtgcagcctttagaagcagaaactcagccgggtgcggcagctcacgcctggaatcccagcactttgggaggcccaagcaggtggatcatgaggtcaggagttcgagaccagcctgaccaacatggtgacatgctgtctctactaaaaatacaaaaaattaccctggtgtggtggtgggcgcctgtagtcccagctactcgggaggctgaggcaggagaatggcttgaacccgggaggcagaggttgcagggagctgggatctcgccactgcactccagcctgggcgacagcgagactccgtctcaaaaaaaaaaaaaaaaaaaaaaaaaaaaaaaaaaacagaagtagaactcatagccaggcatggtggctcacacttgtaatcccagcagtttgggaggcccaggcaggtggatcatcttgaggtcagggcaatatggtgaagaccagcctgggcaatatggagaaaccccttctctactaaaaatacaaaaaattagctaggcatggtggcgggcgcctataatcccagctactagggaggctgaggcaagagaatcacttgaacccgggaggcggaggttgcggtgagccaaggtcacctgggcaacagagagagactttgtctcaaaataaaataaaataggccgggcacggtggctcatgcctataatcccagcaatttgggaggccaaggtgggtgggtcacaaggtcaggagatcaagaccatcctggctaacacggtgaaaccctgtctctactaaaaatacaaaaaattagccgggtgtggcggcgggtgcatgtagtcccagctactggggaggctgaggcaggagaatggtgtgaacccgggagacggagcttgcagtgagccgagatcrcgccactgcactccagcctgggcaacagagcgagactctgtctcaaaaacaaacaaacaaaaaaacacaaaaaacaaacaaaaataattattaatttaatttaatttaattagataaatgtggaaggggaagacccaggaagggtaagttttgggagtaagaaggatattattattagtattagtattagtattagtattagtattagtattagtattagtattttgatgctctgtcacccaggatggagtgcagtgttgtgatctcagctcactgcaacctccatctcctgggttcaagtgattctcgtgccaagagtagacgcagggtttcaccatgttggccaggctggtctcgaactcttggcctcaagtgatccgcgtgcctcggcctcccaacgtgctgggattacaggcgtgagtcaccatgcccggccaaaattttttaagtattattattattttttttttactttttaaaaaatgtatagagatgaggtctcactgtgttgaccaggctggtctcaaactcctggccccaagcagtcctcccatctcagcctcccaaagtgctgagattacaagcatgagccactgcatctggccaggtatagatgacgcttaaagctctggggctgaggccaggtcaaagcaccccagtgtttagacaagtgcttctcaactgggggcaactgtgctgctgctgcacccccaggagacacatggcaatccctggagacatgttgttgtaactggaaggtgctagtcggatgtcgtgggtgggggccagggatgctcctaaacaccttaaaatgcacaggatccatcgtttttgtttattttacagctcaagtgcagtggcgtgatctcggctcactgcaacctctccctcccaggttcaagcaatcctcctgtctcagcccccctagtagctgggattataggcacgtgctaccatgacagactaatctttgtatttttagcctcccaaagtgctgggattacaggtgccagccattgcacccagcctccgcactcttgaagaaccagaaagccaatggtcctcccttctcaagaaaacaagagttggccaggtgcaatggctgacatctgtaattccagtattttgggaggccaaggtgagaggatcacttaagctcaggagttcgagaccagccaggtcaacatagcaagactccatctttacaaagaaaaaaaaagaggctgggcgcggtggctcagacctgtaatcccagcactttgggaggccaaggtgggtggatcacaaggtcaggagatcragaccatcctggccaacgtggtgaaaccccatctctactaaaaatacaaaaatggctgggtgcagtggctcacgcctgtaatcccagcactttggtaggccacggcgggtggatcacaaggtcaagagattgagagcatcctggccaacatggtgaaaccccgtctttaccagaaatacaaaaattagcctggcatggtggtgggcacctgtagtcccagctgctcgggaggctgaggcaggagaatcacttgaacccgggaggcagaggttgcagtgagccgagattgcgccactgcactccagcatgggcggcagagcgagactccgtctgaacaacaacaacaaaaaatacagaaattagctgagtttggtggcrcttgcctgtaatcccagctacttgggaggctgaggcataagaatcgcttgaatccaagaggcagaggctgcagtgagccttgtcgtgtggcaacagagcgagactctgtctccaaaaaaataaaaagagtgaggaaagatggtgctgggccttggaggaagaggaacatatctcctgggcccagaataaggaaggaccacaggccagggacttctggatcttcatgagccaggcaggagttgtcaaatgttaacaggcatcagagtcactggaggacttgttaacttggaagacttctcctgggccccacccccagggcttctggtgcaaaaggggtggggacaaggatttgtatgtctcacaagttctcaggtgatgctgatgccagacctgggaccccaggttaagaaccaccgggctgcccgggtgtggtgtctgacacctgtgatcccagcactttgggaggccaaggcgggcagatcacgagrtcaggagatcgagaccatcctggctaacacrgtgaaaccccrtctctactaaaaatagaaaagaaaattagccgggcgtggtggcgggcgcctgtagtcccagctactcgggaggctgaggcaggagaatggcgtgaacctgggaggcggagcttgcagtgagccaagatcgcgccactgcactctagcctgggcgacagagcgagactctgtctcaaaaaaaaaaaaaaaaaaccactgggctgaagaattaagacttgttggtcctgggagaggaagggcagtggaatataaaatgttaaatctttaaagaagaagagggtcttgataggactgagtgtgtatggaaggctgcgagctcctggatccctgaaggagacagaggcctgtagcctcctccgccttccggagctagggtcatgggtctgagtggggagggcctggggcctggtctcctggatctgagggaggagggaggtggggtctggtctcctggatctgagggaggagggaagtggggtctggactcctggatctgagggaggagggaggtggggtctggtctcctgggtctgagggaggagggactggggcctgatctcctgggtctgagggaggaaggggtggggtctggactcctgggtctgagggaggaggggctgggcctgcacttctcggtctgagggaggaggggctggggtcctggactcctggatctgggggcagtgggcactggggacctggactcgtaggtcctgactcccagcctcctcctcaggagcgcctggaccatgctgctgagcgcctactggcacggcctccacccgggctactacctgagcttcctgaccatcccgctgtgcctggctgccgagggccggctggagtcagccctgcgggggcggctgagcccagggggccagaaggcctgggactgggtgcactggttcctgaagatgcgcgcctatgactacatgtgcatgggcttcktgctgctctccttggcygacacccttcggtactgggcctccatctacttctgtatccacttcctggccctggcagccctggggctggggctggctttaggtgggggcagccccagccggcggaaggcagcatcccagcccaccagccttgccccrgagaagctccgggaggagtaagctgtcacgacgctccctctgccagctggtcccgggaattctgtgaaccaggctgctgtctcctccccagaaagagtccttaccttggagagggtcctggagagaatttcctcttccccagctaaataccctgcctgcaactgaagcagacccgggggtgtcctccctgccctctgcccagaggccacctccactcctacaaaatcaaagtattgtccagacaagagtcactggcccctgctccagcttctgggtatccagagagcactgcacttccccaaaacggaaggggcccctgggcagtgggttttgggcaaattccctttctttgcatccacaatgtggggtcggagcttgggggcaggtcctgggagtgggaagsctcttccttgtgtctttcgctccacttttagctcatcgcaccaatattgcagacttggaaggaagcataagcttcccatttcacaaaggggaaactgaggtgcgggtgcgcgggcctggggacggccgtcccatggcttccatctgagccacctcgggaccccagcrctcctggcgccctcttctcatmgcttggcctatgacaggtcaccgtgtgtaaatctttcccaataaagtgttgcacaaaggcatcstgtccgtgcaggtatctgggtgataaacggtgggaaggacttagtccaccaagtcccagggtgaggtacagcccccccgcccagcccaggaaccaaactgtgaggcccggggcaccacggggacttcagctcccaggagacctttcgcatcagcggccctgagaaaccacaggaagtgtaccttactccctccgggccacctgctggccaggtacacacctgcccctggcccctcccttacctggggcagtgtctgcctggtggccactagagacagcccagcctgggccatggaagaaaacccgaccttggaatcagaagcctggggctcctctagggggtggctggccccccgggaggccagaggaggtagggaatgccaggagaagctcagatccatccgaccttcaggctaggtgggagtcctgctggaggaggaaaggggaggcctggcctcctgagtctgagggctaaagagagaaggttccacttcctgatattatgggggagaagggaactggaggctggaactccagggtctgaggaggaggagcctggagaaccaggctagtctgggaggaggggagggctaagggctgggagtttgggtgtcttgggaataggagaggctgggttcccacactcctgagctagagggaaaaggaagttgaagcctggactccactgccctggagtaggagggttccacgcttggggatggagttgagggctgtggacccctgggtccaggggaagtagaggctggcacccggactcctgggcctgagggaggaggggctgggaacctggtttcctggtctgagggaggaggggctgggtgcctggattcctatgtctgagggaggaggagccgggggcctggactcctgggtctgagggaggaggggccgggggcctgttctcctgggtctgagggaggaggagccgggggcctggactcctgggtctgagggaggaggggccgggggcctgttctcctgggtctgagggaggaggagccgggggcctggactcctgggtctgagggaggaggagccgggggcctggactcctgggtctgagggaggaggagccgggggcctggactcctgggtctgagggaggaggagccgggggcctggactcctgggtctgagggaggaggggccggggacctggtttcctggtctgagggaggaggaattagggcccagactcccgggtcttcccagccccctgctcctccccaggcccatcgctgtcttctgtgctgaacgagctgcccagtgctgccacccttcggtaccgagaccctggggtgctgccttggggggcgctggaggaggaggaggaggatggaggaaggagcagaaaggccttcacagaagtcacccagacagagctgcaggaccctcacccttcccgggaactgccctggcccatgcaggccagacgggcacacaggtgaggccccacctccagctgggacccgcacagcccggaccgggcccttctcccataccctggactcggtctcctccctctgtcctctgccgctcctggcttctggggcctctctctgccccgctcagagctgcctctcttggtttctttcttcccctcatctttgtctctacttcggactccaggtgagtgctgcctttcgatggctctggggtctcttctctctgggatttgccgtctccctggtctccaccaatcctgtctctgcctcagtttctctctgtgtgtgtgtccaaaatctgttaatatttatttctctctgctttataccttccttcatctttgcctcctcttccaagcctccctctctttaacttctttcttttcccattctcactgcataatttgcagggcctggtgaacaatgaaaatgcaggtgccctccttcaaaaatgattatgggcccattgcagtggctcacacctgtaatcccagcactttgggaggcccaggcgagtggatcacctgtggtcaggagttcaagaccagcctggccaacatggcaaaaccccaactctactaaaaatacaaacattagctgggtgtggtggcgggtgcctgtaatcccagctactcgggaggctgaagcaggagaatcgcttgaaccagggagatagaggttgcagtgagccaagatcgtgccattggactccggcctgggtgatagagcgggactccatctcaaatatatatatacgcgtatatacgcgtatatatatacgcatatatgcgtatatatatgcatatgtgtgtatatatatacacatatatatgtatatatatgtgtatatatatggaaaaaacaataaaaaataacaatgtatcaacactcccacgccgatcagtagtgggatcatgcctgtgaatatagccactatactgcggcctgagtaacatagcgagacccccatctctattttttaaaagtaataatcaaagtaacaatatgacaaaaaataatacaagttaaaagaacagctatctatataacatttaccttgtaccgggtgttataagtaatctagaggtgatttaaagtgcattggagggctgggtgtcgtggcccatacctgtagccccagcgctttgggaggctgaggcgggagaattgcttgagcctggaagtttgaggctgcattgagctatgattgcaccaccgcactccagcctggacaacaaaacgagacatttgtctgtaaaaatcagataaaaattaaaataaaataaaacaaacacaggaggatgtgtgtagcctgtatgcaaatactataccgttttatataaggaatttgggcatctacagatttcagtattcttggggagtccttgaaccaacccccatggatactgagggatggctgtattcataaagtgagagcccagataaactccagctagggcaagtgacacggcatgacagcaccctgtgcgtccctcccctgacaccccctttttcctcacaaatacaaggtaacctcttctccctaaccttttttttttttttttgacagagtcttgctctgatgcccaggctggagtgcagtggtgcagtctcagctcactgcagcctccgacacctgggctcaagcgatcctcccactccagcctcctgcttttctgtagagctttgcaagctgtgctctgcaacgttgtgcaaatagaatcatacagtcttcagtcttttgtgctggcttcttctgcctagcattaggtttctttcttttctttctttctttcctttcttggaatctcactccgtcacccaggctggaatgcaatggcgccatctcagctcactgcaacctccacctcccaggttcaagcaattttcctgcctcagcctctcgtgtagctgggattacaggcacccgccaccaggcccagctaatttttttttttttttggtatttttagtagagacaggatttcaccatgttggtcaggctggtctcgaactcctgacctcaggtgattcacccacctcggcctcccaaagtgctgggattacaggcctgagccactgtacccagctggtttcttttttattgctacagagtattctatcttatgtataggccacaatttacttctccattctactgttggattgtgtctacattcagatggttcccagtctggggctgcgaaacccctcattttctgcctgtttccctcccaggcaaagaaatgccagcagggaccaggtggtctatggctctggaactaagacggaccgatgggcgcggctacttcggaggtccaaggagaaaacaaaggaaggcttgcgaagcctgcagccctgggcgtggacactgaagaggatcgggggtgcggtggggtttgggtggtgtcctgggggcagggcctggactcctgggtctgagggaggaggggctggggacggactcctgggtttgagggaggaggggcttgggcctggatttttgggtctgagggaggaggggctgggggtctggactcttgggtctgagaaaggcacggctgggcctggcgcggtggctcacgcctgtaatcccaacagtttgggaggccgaggtgggtggatcacctgaggtcaagaattcgagaccagcctgaccaacatggtgaaacccccgtctctaccaaaaatacaaaaactagctgagcatggtggcgcacgcctgtaatcccagctactcgtgaggctgagacaggagaattgcttgaacccaggaggcggaggttgcagtgagccgagatcgcgccactgcactccatgctgggcggcagagcgaaactccgtctcaaaaaaaaaaaaagaaaagaaaagaaaagaaaaatatatatatatatatatagagagagagagagagagaaagaaaggaaggaaggaaggaaggaaggaaggaaggaaggaaggaaggaaggaaggaaggaaagaaaagaaagaaaggaagaaagaaagaaagaaagaaagaaaagaaagaaagaaagaaagaaagaaagaaagaaagaaagaaagaaagaaagaaagaaagaaagaaaaagaaagaaagaaaagaaagaaagaaagaaaagaaagaaaagaaagaaagaaaggaaggcgcggctggaccccagtccaggggtaggaggagctggtcctgctcccgggaaggaacctgagcctctctctgctgccccctgcaggccagtttggcgccggcacggagtcctacttctccctgctgcgcttcctgctccttcttaacgtgctggcctctgtgctcatggcctgcatgacgctgctgcccacctggttgggaggcgctcccccaggccctcccggccccgacatctcctcgccctgcggctcctataacccccactcccagggcctggtcacctttgccacccagctcttcaacttgctctcgggtgaggtaggtgcctgggtccctgggggattccccgcccacctgtgaccccagtgccttcaatgacacgaacctcaaaccctgaccccagaccctgactgtgcagctccaggagccccgcctcctcccacagtggcccctgcgccgccttccccccacagggttacctggaatggtcccctctcttctatggcttctacccgccccgcccacgcctggcggtcacctacctgtgctgggcctttgccgttggcctcatctgcctcctgctcatcctgcatcgggtcagtggcacctgcacccctgacccctgacgggacgggttggggtgggggagcaagtggtggtggcagaaacccctccccaagaatcctcagtctttttttttttgagacggagttttgctcttattgcccaggctagagtgtagtggcgcaatctcggctcactgcaacctccgccttccggtttcaagcgattctcctgcctcagcctcccaagttgctgggattacaggcgcccgccaccacgcccagctaacttttttgtatttttagtagagatggggtttcaccatgttggtcaggctggtcttgaactgctgacctcgtgatccacccgcctcggcctcccacagtgctgggattacaggcgtgagccaccgcgcccggccccagaatcctcggtcttgctgtgtaaccctttattctgtgtgagttaaaatcaaggttttgggccaggagcggtggcccaggaggcggagcttgcagtgagccgagtttgcgccactgcactccagcctgggcgacagagagaaactccatctaaaaaaaaaaaaaagatcaaggttttgggatttgtttttgtttttcatttgttttgtttgtttgtttttgagacagagtcttactctgtcgcccaggctggagtgcaatggcacgatcttggctcactgcaacctccacctcccgggttcaagcgattctactgcctcaccctcccaagtagctgggtttacaggctccggccaccacgcccagctaattttttgtatttttagtagagacggggtatcgccatgttggccaggctggtctcgaa

SEQ ID NO: 97641 - DNA, 25695 bp, Homo sapiens
ggcgccgacagccagttgttctgggatccctgaacagcaaacgctcccgggaaaaggcctcaagccgactactgggttcaaatctcttgaaggtcaggtcggcatggctgagccaattcctccgcttgcaagactcagggttcggagtctgccaatttggaattcacgtgactatgtgttaagtttctcgcggggacgcgggggtagagggctgcaaggcacagggagcctaaggcgccaggccctcggacttggaggttgcctggaatgggtcagtcacctgggagccggttcctctgcctcgggcttcggacgcacacggtccgcaccaagggcaccagcttctgcttcaaagcacccgccgccaggcctccacaccggaacatttcggcgaccgctattcgggacctcctccttccctttcctctcacgcacgaccgacgggtcaaacaccgtgagccccggccagctcccccagtctcttcacacgcacattacgcagactcctcctcccagctccgggtgggcattggacagagaagccggcctgctagagccggggaaggggaacggcgaccggaggcctactgcgcaggcgtagcactcgctgccgcattgcgattggtccgcacggcgagaggatttgcgcatgcactagctggccgcaagctcgcaaagacgctggctctaggtagccggttttcgcgagtttgtggcacagtgttggactgaacgagttaaggaacctgttcaaggagggactcgtggggccgctttgattggcggttgtgcctggtgctgccgctgtgttggtgacgagaactgataacagcatctcacaacagcgtagccccggcatcgcactttgttttttggttttaggacaccagttacttgataccgaagccttcctgattcttttgcagtgatccagatccagtttttccatgagtccgaggcgcggaacctggcttcccagatccggcgtgtacttccatcttttaccagttgccggctctttcccacccaacccgtttcctggacaagtaattctgcgctcttcttcccgcctgtcacctttatttattagttcagttgtgtgtcctagatgctgtataccaggtgctacagatacacacagtctcctgctgtggtttctgtgcttgggagcaggatgttagcaaaaagcgttcgtgcttctcggactttctgggaagagaagtctgctaagcagaactttcagttatgggagtagggtgaggggctgagtgtaaataagtgttttgactctgccagatataagctaaattggaaataatgttttggctgcatgcagaacatacaatgtgcctgtttcaaagattcagcttacatattcatttaacaagtatttattgagcacttacctcttggattgtactataaaaggggctctgttgggtatgaaaagtacggatggtccccgacttacccctcacaatggttcgacttacaatttttcgactttatgatgggtttaatgagacctaaccccatgtcagtcgaggagcatctggacttaagcatggttcaacttacggttttttgactttatgatgggtttatcagggtattaaatgcagtttcgacttaacgatattttcagtttacaatgggtttatttggacatagcatctatataggaagtggccactgtctagttggggagatgacatataccggtcattgaaataatatctggcgtagtgccggacagagcaagagagaagactatgggatggaatcactatggtagaacttcgtgtaagaagttatttgagttgtgtcttgaaggatgagtagtaaaattcaaacagtggaggaaaaggattgatatttcagatggtgaatactttcggaccaaagataacatttttcattgttaaacatgttgaccttggatccagaccaacccacattgaatcctggctctgccacctgggcaagtcacttaattgtgcctcattttcctcatctacaaatctcaggagggtgttcggaagactaaatgagctaatatttgtaaagtgtcttagaggaagcaccatgctgtttgttaaatgaaaaggcttggaactgttttaaaaaaccaaaacccagcacattttcgggggacaatgatagagagtacatactaagaagtattgatgtggtcaggctccgtggctcatgcctgtaatcccagcactttgggaggcctaggcgggtgaatcactttaggtcaggagtttaagaccagtctggccaacatggtgaaaccccgtctctacaaaaaatccaaaaattagccgggcgccatggcatgcgcctgtaatcccagctactagggagactgaggcaggagactcgcttgaacctgccaggtggaggctgcagtgagccaagattgtgccactgcactccagcctggatgatggagcaagactctgtctccaaaaagaaaaaaataaagaagtagtgataaagacaggcaagtatggtggggggccagatttgaactggcaagagttgggccctaactttggaggtaatgaagttactttttttttttttttggtggaatggggatagagaatgaaattacagggccgggtgcagtggctcatgcctgtaatgccagtactttgggaggacgagtgggaagattgcttgaggccaggagttccagaccagcctgagcacataatgagacatcatctctaccattttttttttaaattagccaggcgtggtggtatgtgcctgtggttccagctactcaggaggctgagatgggaggatcacttgagcctaggagatcgagactgcagtgagcagtgattgctcccgtgcactccagcctggatgacagagcgagaccctatttcaaaaaagaaaaagaaagaaattacaaagatactctttttttttttttttttttcttgagacggagtctccctttgtcacccaggctggagtgcagtggcagtatctcggctcactgcaacttctgcctcccaggttcaagcaattctcctgcctcagcctcccgagtagctgggattacaggcagatgccaccgcgccctgctaatttttctatttttagtagagacggggttccacaatgttgtccaggctggtcttgaactcctgatctcaggtgatcgcccgcctcggcctcccaaagtgcttggattacaggcatgagccacctcgcccggcctacaaagacacccttctgtgaagtttaacccaggaagtagttttgttttttggttttctttaagagacagtctcattacgttgcccaggctggtcttgaactcctgggctcaagcaatcctgctgcctcagcctctcaaagtgttgggattacacgtgtgagccactgtgccaggcctaggaagtagtcattatgtggtgaagatgatccagggctcccttacccattaagcagagtagatcagtgttcagaagtgcaggcaatgggtgacattttatctagagctcctttggataaatattgaaaatatggtcaggctctgtggctcatgcctgtaatcccagcactttgggaggccgaggagggtggatcactttaggccaggggataaatattgaaagtatcaattccaggccgggcacggtggctcatgcctgtaatctcagcactttgggaggccaaggcgggcggatcacgaggtccggagatcgagaccagcctggctaacacagtgaaaccccgtctctactaaaaatacaaaaaaattagccaggcgtggtggcgggcgcctgtagtcccagctacttgggaggctgaggcaggagaatggcgtgaacctgggaggcggagcttgcagtgagccgagattgtgtcactgcactccagcccgggtgacagagcgagactccatctcaaaaaaaaaaaaaaaaagtatcaattccaaagtaaggtaaaaattatttatatttacttaacattttaacagccttgcattgatttttattgatatttgtaaaaaccaataatcatggattgattaaatacaaagttaattatatctgatggcaaaagagactggaaaacactgtcaaaatcatgataatcaggtacctatgaaaacaactgcatgtatttgaaagtaatttaataatgcacaattaacacaaagggcattgtacagtacatttaatttttttacaataggtacaataaggtagttttcctgtccttttaattaaaaattatatttttatcttttttcaaaagcaatatatactcattgaattaattccaaaaaatataagtggaaatcccccaaagtctcaccccacagaagtaacagacaccttttattagggcaagaagcccattttgagatatcatattttcagaaatcaaagtttcttccttacaaaagtagactcagtgacaagtttttgctagaagcttacattgaaataatcttattatgtacatatgtttttttaatatctctcaggaagttagcattaattctagctgtgaattggcaaagggcaaagcccctttctactttgtgtacaggatgtacctaattaatagttacccctctccaccttaaagctattctgtagataaagatcatcaggggcattaacttccaatacagaggggaacgatccagcaaactaggcatcagactaatcaaaaccaaaaatactgtacaatgatgattgatacataatacaatgaaaattggtattcataaggatgattttggattagccaactaagaggaaatccttatctgggtagttttaatgctgagtagtataatgtagggttttagaaatgggcgacccacatatatgataaaagggttagctgtaaatatatctgctagctcagctaataaacttattaactggaagatgccattctgagtaacttggacgtccttgagtagtcacattccaatttgctttcaggtatatcactgatgcactgaattgtttttctctcagcagaaatggatttggtcatgtttgtctcttcctgcagctcaacctcccaaataagatggcagctcaactgtgctgtttgaatccctgaccttgatggcattagcaataactcacgagtcagtgctagtgacatgtgtcagtgttaccttagcttatgaaatatgtagggggagaggtaaagtcttaaaagaaacaaatgggtgcactttatcgtatgtaaattgtacccccagtaaagtcgatttcaaacaaattctgaacccgcgaatgactttagggagaaggaatactggtcttgaccaagatgtgtgtgatgattagtaagctttgggcagcagccccctaatactgtaaggaggttgtgttcatttatcatcttccaagcataatctaggcttctggcaaattagacccaaccactttgttctacattcagctgcagggggaggtgaaccctcctagggattcccaactccctctgaaactccagcgttctggagggacttatggttatatggagggcttgggaatggaaggcactgtggagcttatgccattgtcccaagatcctccacctgggccagtaatggctagccccgtaaacaaagtccccttttgctggaactgccaccactagcttcccccccttctcctagcctctgtgtggccctctcccgcggcgggccttccccattggccagccaaacacaaccgactgcggcagccaataggagccgctctcctgaacattcagaggatgggtgcgcgtggtgtgataaggggatgttggcgcctggtacgcgcccccctacatctggcaagtctgtaacagaaacagttacaccccctacacacgcacacgcgtgcccgctggctccctcctctcagctgtacaggccccggacaacccactgcgtgtcttggcagcggcctcccaggctgcctggggcccgcgagtgcacctgctcactcattaagacagagcatccctktatcccaaggcgcgggtcgggtagagggtgggggtagaggggacggggtagcggggaccgggaaggcgcggctcagctgcccgctgctcccgaggtgaaagaggtgcctccgcccccaccccatccccgcagagttgcgttgctccagggaggccgaagtgatccagtgatgtcttaaggtgcagctctttgtcctccccagctgtgctccctgcccgctgaccccgtgcgctcgagccagtgggggtggggagcccgaaacctataacataaacgggggcaaggagaaagaagtctatcccggggtggcgtgtgccgctgtccccaccccgtctctttcctcctgaggcttcttccctcgggtccgtcccgggaatgcaggcaggggagggtgtgggccgaggcgcggcggcggctggagcagcgcggtagggtccttcgccagagcatccggtccgagggcgcacacaggcagaaggctsgcggctcgtccactctcctccctctctcctcctctccctggcttttgtgttggtgcctcygagctgcaaggagggtgcgctggaggaggaggaggggggcccggagtgagaggcacccccttcacgcgcgcgcgcgcacacggtgccggcgcacgcacacacgggcggacacacacacrcgcgcgcacacacacacgcasagagctcgctcgcctcgagcgcacgaacgtggacgttctctttgtgtggagccctcaaggggggttggggccccggttcggtccgggggagatggcgcagcccatcctgggccatgggagcctgcagcccgcctcggccgctggcctggcgtccctggagctcgactcrtcgctggaccagtacgtgcagattcgcatcttcaaaataatcgtgattggggactccaacgtgggcaagacctgcctgaccttccgcttctgcgggggtaccttcccagacaagactgaagccaccatcggcgtggacttcagggagaagaccgtggaaatcgagggcgagaagatcaaggtgatccagggggtcaggtccaggaagggtgggacccgggaggggacctcgcccgaggcatagctctagcggttgtcgtcgtccagcgtccagcgcgtggcggtttcgcctcttgctgagccgaggaccctcggctcctcctcaccccttttcacctctctcagcggggccccgtccccacttcactcagttttttagggcggttgagaatggggttgcattcttacccttagcccctgcctgacaggtcctgccaggaaaagcatgttggattcccatccatgacccctaccccgagcagcggcacctgtgggcagagggaggcaggaggcatctgtgggtcctagtctctgggatggatcccaaagcactttacacatcctgatgtctcttctacygcttgggtgccgataggctgcaaaaccccactttggctaagcctcaaggcgttagagggaaggaaatgatggaaatccatggagaatgaaaaagctgctttattttaaattgcagtttatagttaaaaaattagggctgagttgagatggcggtggagtggggtggttctggcagaaagccatgagcccttttaaagaaattgaggcagggtccagcccttcgtaatagacaaaacttgtttttttgtaacagcccccctggaatgatatcttctttacttgtctggggcatctaatacatgaactgctccttattcattctgttggtattgtcttcaggtctttgtaaaaatgcagtgacttaaccgagggccaggggaatgttcaatcctccccctccatgagtttatgtaataggctaagtgcaaatattcttgtctgaccatttgtgctcacctttaattcagaaaaggtagaaacctgatatgacaggaatatgtcaatgtgcaggggatggcgggagggaggacataacaagggcaacttcttgtgtcatggggagcagaggggggcctctataaaggcactgggatcactgaagacaactcctctaggctcacagctggcctttccttgagcgtatggttggaccttagacagagtcaggggtgacagtaagcctccttcttgctggtcaaactgccaaagtgaccacaaggcccctcctctgagtgacgtggagagaagggctgagtaactgatgaaactgatgaaacacttgaaactgtgcgagactcctgactccttgattattaaaatgaacgtgttctaaaaatggcttcagaaactaggccaactcactagatgtcaggaagatggacagctcagtactgataagggagagccccagggtaggaagatagaacattattttgaaatcgtgatcttttttgccccttgcattttggaagggaagtgctacatttccttttaaagtcaaaggcggtatctgtctctgtcctttcctggggctgttgacatttgcttggttaagacttcctctagtgtgtctagcttctttaatgtaaggctataagattctagaatttctaaaacatgactttgtaatccaaagtagaaatatctttacagatgggctcttaaacctcaaaaacctaatgctcccatttgcttaaaatcaagtgctacagtgagccaaagagttccctggatttaaaaggtgggaaataagtccatctgaaatttagatggaaaaaatgaagtgtttgggaatctaaagaaggagggaggaagaagctagaaagtgagggatgacagatgaacacgagtggaagagtcaccacccagtggccttgaaggaatttttaaactattccttctctyctaacaccccagtacttagccaaactggactttacagtctctggcaaagattccagactttttcccagagggcagagcctgtgacagtgtgactcactagaaacagagctcagcacaacaccacgtgcagataagtgcttaatacaggcttttttggggaagatgatattttcaaggggacaaagccttgtgacactgctcatggaggagtcctctgagggcagattccraaggagctcagagtggcgtgtgggagtggggagatggtgaccctgcttcttgtaaagctgctgcaatctcaggaccatgctggcaggcgagagaccagcatgtctgtgggaagatggcagagcctggcggctagcacgtgatctagataagagaagatttggcctcgcactctggctagcctgaagttgttcaaggaatacatgccaaagccatgcttggagatgactgccaagggcttcgtcctttgcgagagagagaaaagtccagtgtgacagtccgaggtctggcctagaccatggccagcaatagaaggcttttgggctgtaacataccagcccttggaggagagtggtagagaggtctcagccagctcttctcagtctaagagcaagggtgtggcctcttctgggctgcctgcctgtgtcccggggtagcacatacatgaacccctgctagggacaactgatttggtgtagttagagccacactgtaattaattatcaaggccatccctagggtattgaagccccatttgctgtctccaatcattatgttccccrccctcaccccatcaaagcatttacaattgagtcctgatgaactcaattgtatgaacatcaagaaaagcctccaatgagtaggcaataataataataataataacaactatgtattgaataagcaaagagcccaggctaggcactttacatgcattatcttatttactcctcacagcagctttatgaaatcagcagtattgttatcattcccattttatagataaggagactgaggctaagagagatgaaataacccagtggcacatggatctgagcttcagcctttgactctygagcccaagcacttcgccacctcactatcctacctttcctgttacagggccacgatttcaacccagattcagagaccatgccctttaccactgcatttcactctacaggrcaatattcagtcccctagattgggggagtttgacagggggagatagaatgccaggcagccagtcttgctctttcttctaggccagggacttagggttatagcccaaggcccccaggagcctttcagatgtctccttcaatttgtatccaggacacacagaactcaactgggtttacttttttttttttttttttttttgagagggagtttcactcttgttgcccaagctggagtgcaatggcacgatctcagctcactgcaacctcggcctcctgggttcaagcagttctcctgcctcagcctcctgagtagctgggattataggcacctgccatgatgcccagctaatttttrtatttttagtagagatggggtttcaccatgttrgccaggctggtctygaactcctgacctcaggtgatccacctgcctcgrcctcccaaagtgctgggattacaggcgggagccctgggtttactttttgcaccttgattatctcaactcaggtgtgagatgcagaaaatgttcagagataaaagagatgttacagattctgtratccagtgtcctcctcttgcagataggaaactgagactcagagagggaaagtgacttgcccaagatcacacagggccaggcctagaactcatgtctcctaattccctttctggtgctctttccacacatcatgctgcctggcacaaaatcctctctccagcctagctccatggtccatccaacccacaaggccacctatgacaagaatccagagggacatcataagagatagctgacagtctttcctgacatcagcctaggaagggtggaggcatcccccagcccccaaaggaagagtggagcttcccttaatgactatgatgtgtctgtcacctacagatgtagctaaatttattgagtctgtctcctaaatgcattggaaaatgccgaataggggtgtgtgtgtgtgtgtagagagggagggtatgtagtagaggggaggctaagaaactaatttttgaatcattctttgtatatttgcatggaagcttcacttctgtctataatagtttggttcctcccacaggctgggcactccctgtgccccagccctggggacaagacaaactgcaggtcagctgtggctatgggcaggtacagctcaggactgtgagtttctgttcctctactgatcactgggggaaaaaaaataccttcctgtgttacattatcaagtggatggaggctgagctaagtgttccttggaagctgcctgcagtcagaatgacatcatttcttccttagggcttctgagcttctatcttctgccagttaacttaatggttaattatccatcagtgtaagtttctctgtctcccttgctgcttctttctgtgtgtgagtttctctttgtctctgtcctcctttgccattctctgtgtcagctttgtgtgtggatcttagatgcagatgggacagtccagctagttgaaaacaggtttcttttaaacttttcccatcatccactggggcatgctccagaggttacagatgtatttgtctcctttttttgcacttctaccctcccccatcggcctccaacaaaagcacattcatgcctcatctatagaaagatgccagttaatgtttcctagggaaaagaaatccccctgtcagctaagagcacatgcagggggttgggggcttgctgaagctcgcccagaaaatagttcaaaaggttagatatctctttggcagttccccatgctgtgcccctccatcctcctccagcaccccatcagttcgggcctgcccccggccacccatggcatgttgccagtattcctctctccaccccctccccactggatggcctttagctctgtctcaccttcgagaagccaagctttctgtgatttccaggatgagagaccaatggacccaaggaaccataccaacaggagagggcttgatggcctttctgagaccagagcaacaactaatatttgcagagtgcttgacattttccaaaagtcctttctcatgtgttatttcactggatcatcccagcaaccataggaggatcaaggtcccattgcagagatgagaaaaacaaggctcagttcagggaggttaaaagacttgtctggcatttactcagcttctgagcagaagagctgggatgcttgctgcctttccaacagtgcttgctcaagttgttgcccatctagacttaatggtggaggtttcaggccatgaaagaagggagagtgtatattaggcactgggtcacatacttacaaggactactaatcctcatagcatccctacctgattactattgttatcatcactttccagatgaggacactgaagtcagagaaagtaacttacctaaggacacctaacttatctaaggacacctaacaagtcatgtactaacatgacttgggccgagatctgcacccaagttgatttgactccactataccccattggccatctgacagaaacaaggatctggggtacatgtatgtggctgtggctaagaggcagtcttcacccccatccactgtatggatatggtgcccacaggaaaggaggaaagggtgagaggagaggcagctgcgaaagaggaaggagatgctttcactgcttggcaggggccaggggtttatgaagatgctgagaaaggaacacctaactctcaaacaaaatgagatcactgctaggtaaggtggcttgccagcactttgggaggccgaggcaggatgattgcttgagcccaggagatccagaccagcctgggcaacataaggaggaccccatctctatgaaataaaaaaaatatgaaaattagttgggtgtgctggtgcgtgcctgtagtcccagttactccgaaggctgaagagggaggattgcttgcgcmtaggaggttgaggctgcagtgagccatgattgcactgctgcactccagcstgggtgacacaatgagatcttgtctggaaaagagagagagagagagagagaaagagaccaggcgtggtggctcacacctagagtcccagcactttgggaggcccaggtgggcagatcacttgagcctaggaatttgagaccagcctgggcaacatggggaaaccccatctctacaaaaaatacaaaaattagccrggtrtggtggtgcrtgcctgtagtcccagctactcgggaggccaaggtgggaggatcacctgagccctcatgcctcagcactcctccaacctatttatttttgagacagagtcttgctctgtcrcccaggctggagtgcagtggcgccatctcgrctcactgcaagctccgcctcccaggttcacgccattctcctgtctcagcctcccgagtagctgggactacaggcgtccaccaccacgcccagctaattttttgtatkttttagtagagacagggtttcaccgcrttagccaggatggtctcgatctcctraccttgtgatccacckgsctcggcctcccaaagtgctgggattacaggcgtgagccaccgcrcccggcgattttttttttttttttaatgagatcatttcatgtgtttagggagcctgcctgctgtgatcttcctttctgatggttctgaggccacaccactggttcttctattttctgctgcgagcagcctgcttcctggctcccctctcacgacagacacgtctgcaaagaactcagggtggggtttacaaagagctggaagggagcagtgcctgcagtttaaattcggagcctccaaataaaagcttcaaggctcccaatagtgttggaaagacagaggaggtctccagcagagagggccctcctggcagttccggcaatttgggcggcatacgcaattatgaagccaaagaaaagccaaatggccaacctcactcagcctcaaacacctcacacactcccacccgtgttcctgctagtggcaggtatttttagagtcctgagctcatggtgttaaagcatctgccacatgcctgagggctggtagggattcagacttcttcagaggcaaaaggcaagagtgaagactcctggggggtggggggagtggggatcaggagccaagtggtaatgatattcctgggctatgcctgctgtcttcctactgacctccattcctcctgtggtctgctctccctttcttcctgttcggaacaccacggagaggtggaagaaatgaaaatattttctgtctcttgcttgcagaagcaaatcagtctttgaggacttatgttttttctgtgtgatcacagtcagacgttctctctgaaatccccttggcacatatctaggatgccagactgcttgtagttttagtggttcaggccatcactgccttttgataatgtgtctgctgctgataatgatgatgatgacaacctcagtgacgagtgtggtctgatgcagaaaaagactgcttacagtcttgctggagagatgccaagagcactgacgagacaattagaaaacataaatctattcaaaatggtatgatgcagactcaaagtgcaacagagattcctaagaaaagagaattgaagggaagttggcgaaggtttgaggaagaagcctgaggcgtgagcttaaccttgaagaatgggtgagatttggatagggcaatgagggggcagctgattctataggggaggagtggactagcatgacccaaagtacagaggagggaatcaaccaggtgtagctgagtagtttgaaaccaggttgggaagggtcaaattatggcagacagaattccacatgtggaatccatgtgatgccacatacagtagagggctgcagtcgtttcctgaagaggtgaatggcatgctgatacaagcagggattgactaaagctagtcagaaagccagtattcagagatcgggcactggggctcacgcctgtaatcccagcactttcaggggctgaggcaggtggatcggcagtgattgggcctcccaacatgctgggattacaggagtgagccactatactcagactccaatttatttttatttatttattttttattttgagatggagtttagctctgttgcccaggctggagtgctgtggcaccatctcggctcactgcaagctccgtcttccgggctcatgccattctctggcctcagcctcccgagtagctgggactacaggcrcctgccaccacacccagctaatttttttatattttttggtagagacggggtttaactgtgttagccagtatggtctcgatctcctgatctcgtgatccgcccgcctcagcctcccaaaatgctgggattacaggcgtgagccactgcgcctggcctccaatttatttttaagttcacttttttgttacctaaggtcaggagtttgagaccagcctggcyaacayggcaaaaccccatctytactaaaaatacaaaaaktagccaggcgcagtggcacacgcctgttatcccagctacttgggaggctgaggcaggaraatcgcttgaacctgggaggtggaggttgcagtgagyygagwttgcaccactgcactccagcctgggcaacagagcaacagtccatctcaaaaaaaaaaaaaaaaaaaaaaaaaaagcaagcaagcgagcagtgttcaggagaccctgcaatggaaacatccacaatccaaaatactttgctctagtccaggagtgaggagaggagaggctggccgagggccgagggacacagaaatcagaatagaagaagggttcaatctgaaggtcttgccagaggaacttggaagctgtgtcaatagagggagatgacggggagcctggacaatgaaaactgatattcggaatgatgactctagggccctgtaaaatcttcactcagccgacagattcaattatatttactagattatacttactgactgctaactccaaataaaggctatacttcgttttaagagccatagcagtcaattagtggccataatcaaattttctttgataactgagaattgtatagggccttgggaccatcattctgagcatgaatctcccttgtccaagacgttggatatataaagggaaatagattgggctgaatgtatatctcctgggagttatgtctttgcatatgttacagatagcagctttttcttcataatttggcctttatcccaaaagctgagatacagaagaaaaatccagtgaattaagttccttttacataaccaaaaagtgaacttaaaaataaattggaggctgggcatggtggctcacgcctgtaatcccagcactttgggaggctcgatcatttgaggtcaggaattcaagactagcctggccaacatggtgaaaccccatctctactaaaaatacamaaattagctgggcatggtggcgcacgactgtaatcccagctcctcagaaggctgaagtggtagaatctcttgaacccaggatgtggaggttgcagtgagctgagatcrcrcyactgcactccagcctgggcgacagaacaagactctcatctcaaaataataaataaataaataaatagggcttgaaggtgagattttaatactaactttgttttctttaaaaagttattcaggctagtggctcatgcctgtaatcccagcacattttgaggccgaggcaggaggattgcttgaggccaagagttcgagactagcctaggcaacataacaagattctgtctctacaaaaaaaaaaaaaaaaaaatatatatatatatatatatatatacacatatatataacatatatacacacaatatatataacatatatatgtaatatatataacatatacactatatataacatatatgtaatatatataacatatatatgcatacttgtagaagaaaatatggaaaaatatttaaaaagaagaaaataaatatcactatagtctcattgctgataaataaccattaatgttctgatgtgtacacttccagtctgtgctttgcatatgtttatgtttaacgtttcttaaaaaaaactgggaccatagcatatgaaaacttttgaggctgggcgtggtggctcatgcctgtaatcccagctctttgggaagccgaggcaggcggatcacctgagatcrggagttcaagaccagcctgaccaacatggagaaactcygtctctactaaaaatataaaattagcygggcgtggtggcacatgcctgtaatgccagctactcaggagtctgaggtgggagaattgcktgaacccaggtggcagaggttgcagtgagccgagatymcgccatttcactctagcctgggcaacaggaacgaaattctgtctcaaaaaaaaaataaaagaaaagaaaaaagaaaaattctgtattctgcattttcacttacttgtattttgtgagcgtttctcttacaatttagtctttgaaaacattatttttaatggctgcataatatcccactgtacggatatattttcatttttgtttattctttttgagacggagtctcactgtgttgcccaggctgaagtgcagtggcccgatctcggcttactgcaaccaccgcctcccgggttcaagcrattcttgtgtctcagcctcccgagtagctgggactataggtacacaccaccaggcctggctaattttttttgtatttctagtagagatgggatttcaccatgttggccaggctrgtctygaactcctgacctcagatgatccacctgcctcagcctcccaaagygctgggattacaggcatgagccactgtacctgaccccactgtatagacatgaactttagctattccttttctgatgagcatttaggtttttcctgttttaaaaaaattctcagtggctcaagccagtaatcccagcactttgggaggctgaggcaggcggatcacgaggtgaggagatcgagaccatcctggctaacacrgtgaaaccccatctctactaaaaatacaaaaaattatccaggcgtggtggcgggcacctgtggtcccagctacttgggaggctgaggcaggagaatggcgtgaacctgggaggcggagcttgcagtgagccgagatggcgccactgcaccccagcctgggtgacagagcgagacacggtctcaaaaaaaaaaattctaaataacactgtaagatattagtacagaattttgaccacatccctatttcttttgtatagatttctggaagtgagatttcaggtcctaagagttatgaacatttttgaggttcttgataatattgccaaattgctctccagaaaagttgaccaatttacatccagtttttcaactaaaaatcttaagatttttttcaactcaagattttcagttaacaatcttaagaaaaacttgacaaatcctgaaacttctctttatgctttgataagtccattctgctcatctgtcaaagaaccacttcctgtgtcacggcttgtcactttttttattttttttgaaatggagttttgctctttttgcccakgctggagtgcaatggygtgatctcggctcactgcaacctccractccctggttcaagsaattctcttgcctcagcctcccccgtagctgggattacaggcatgcaccaccatgcccggctaattttgtatttttagtagagttgaggtttcwccatgttggtcaggctggtctcaaattcctgacctcaggtgatctgcccgcctcagcttcccaaagtgctgggattayaggcgtgagccaccgcacccgtcctgtcacttcatttttatagtgctacagaaccatgttttctcctctctgttcatgttcccttttctgactccacctttgggtttttgtatcttccaggttcaggtgtgggacacagcaggtcaggaacgtttccgcaaaagcatggtcgagcattactaccgcaacgtacatgccgtggtcttcgtctatgacgtcaccaagatgacatctttcaccaacctcaaaatgtggatccaagaatgcaatgggcatgctgtgcccccactagtccccaaagtgcttgtgggcaacaagtgtgacttgagggaacagatccaggtgccctccaacttagccctgaaatttgctgatgcccacaacatgctcttgtttgagacatcggccaaggaccccaaagagagccagaacgtggagtcgattttcatgtgcttggcttgccgattgaaggcccagaaatccctgctgtatcgtgatgctgagaggcagcaggggaaggtgcagaaactggagttcccacaggaagctaacagtaaaacttcctgtccttgttgaaaccaaacgatataaatacaagataaattatcactggagttttttctttcccttttttctgtgcctgcataatgctgacacctgcttgtttccatacaaattgatatcaaaataaaatttgtatagattatcacatggctttttgtcttgctttcctccaagacattcctgattgtgatgagcagaacaggcagtttgccctactagagtgatattctccatgccagtggcacactccctaccagctttctaggctctctgaaattctcatcgtttgagtcacttcttcaggactaattcattctctcactcagtgtaatcagtgggcagaaacacccggtggggttgggacacaggccagatatgtttttctagagagcaagtgcaggtggagtgatagagaagtcttgaaaggagatgtggactcatcagtatttcctaggttccctagatatgtgccttgaatgtccagatagactactctctccctattttccagtttaaaagtaaaaagtatggccggacgcagtggctcacgcctgtaataccaagactttgggaagctgaggcaggcaggtcacttgaggtcaggagttagagaccagcctggccaacatggcgaaaacctgtctctactaataatacaaaaattagccaggcatggtggcacatgcctgtaatcccagctactcgagggctgaggcaggagaatcacttgaacctgggaggcggaggttgcagtgagccaagattgtgccactgtgctccagcctgggtgacagagtgaaactgtgtcaaaaaaaaaaaaaaaaaaaaaaggagagttggtccagtgggcccaattacttccagaatagttagattctgcttcccatttttcaccaatcagtcttgaaccctaaggctgttccgactgtgacccccacccccattctttcttggatgggcagggctcaagcaacaaatatctatcatgtccccagacctttgctaggtgctagggaagaaatgttacaagaggacacattctctatgttcagagaccctatgatctatttgcaggaacgatgtacacactgaaagtacgtgcaaacaaaaactagacaacaacatcaccaagtgtgaggttgtgccatgggaagtgagagcattatgtattcaatatcagggagggctcataggaaaatacttagatttgttttgtttgttaaataatgtgtaaggtttagattggtaaaggagagggaagcgggcaaaatcagggcaaaatcaggggggcaggaatgaccttggaagttggaagagaggacaactgggggtctggcccaaggagagctgagcagtgctaacaggagccgaggttgggaagggcttgtgcatcaggcagaacagtttggagacttttttttttttctgagacagagtctcgctctgttgcccagactggagtgcagtggtgcgatctcagctcactgtaacctccacctcccgggttcaaacaattctccctgcctcagcctcctgagtagctgtgattacaggcacctgccaccacgcccagctaatgtttgtattttttagtagagacagggtttcaccacgttggccaggctggtctcaactcctggcctcaggtgatttgcctgcctctgccttccaaagtgctgagattacaggcgtgagccaccgcaccgagctcggacttactttctgagccaatgagagctcttggtagttttccagcaggagagtcctatagttatttctcatacatctggtcttattattgatacgaaagctccttgtccaattgtgaaagtaactaaaagtggctagtaaaggcttgtctacaatagctccaggtggatttctttgcatgaaagatggtgtgctcctttaggggtctctcttgttggaatcccgctgtgagggggtctcgggaagacagctcttgaacactttcctctgttaggcatatggagctctgctcctagacagcgaagggtaacacacaccagatgttcttcccacccaaataaagagcttgtctagtcctgcctggctcatccttgcagccctctccaccccatcccatccccctctggcctcagactcagttcagcccccagtggcctcagactcagtccagcccccagtctggttctcgtcacttgacttttgcctggatctcagtctttggaatctgcctagcactccagttagagctgcttttcttactagttgtccccatccaactcccagccccagaatctcccccaaagggctgggctcccactgtctgtggatgagctgtgtgctggaagcctggttgctatacctctcccagatggaacatcccacgaccttgtctcacactccagacactgactccttgctcaggacacaacctgttgttgtgtcgccttttggttgccgtcacctggcttgcagacctaggctactgctcagttactacaagtgcatttgtctgtcctaatgggtgcatttcagtttgggtccaggcccctcttggtcaggcctctttcttcagttacaggggccaaggatgacaacattcctagtgttatgagccctctaaccaggattgcctctgacaacttctaggcttctaggctttctttcctcccctcccctcccctcccctctcctcctctttctttctttcattcttttttccttccttccttccttccttccttccttccttccttccttcctttctttctttcttatttttttttgacagagtttcactctcgtcgcccaggctggagtgcaatggcacaatcttggctcactgcaacctccactcccggattcaagcaattctcctgcctgagcctcccgagtagctgggattacaggtgcccaccaccatgcccagctaatttttgtatttttctagagacggggtttcaccatgttggccaggctggtctcaaactcctgacctcaggtgatctgcccacctcggcctcccaaagtactgggattacagtcatgagtcactgcgcctggccacctcctaggcttttaacaaacattcactgagagcccactatgtgccactgttctgaatcctggggttacatacatgaacaaagtcctgctctcctaaaggagacagacactaaacaagaaatgaggaccctacataagctcatttgagagagtgataaggactctgggagccacaaaacagggtaaatgaattgaaggtgacagacgtgggggagggtaacatattgctggagtggcacaaaagacatctttgaagagatgccacttgagctgagaactgaatgaagaaaagcaaccagggacaggtgcaatgactcatgcctgtaatctcagagctttggggggccaagatgggaggattgcttgagcccaggagttcaagaccaggctgggcaatatggtgagaccctgtctctagaaaaaaaaaattaaaattagcccagtgcaatgttgcgtacctgtagttccagctactcggaaggttgaggtgggaggaacccttgagctgggaatgtgaaggctccagtgagccaagatcgcactagtgccctccagcctgggtgagagagtgagattctgtctcagaaaaaaaaaaaaaagaaataaagaaaagaaaaagggagaagagaaccccaagcagcagaaacagcaaatgtcaagatccagaggcaggtggtgtgacattggcgtgtttgagggacagaaagggggctactatggagatggctggaatagagcaagcaaaggagagagtggcaagaaataggtaaggccaggtctatgggggcgctatgggccatgactgggagttttcttttcttttcctattttattttattattattattattatttttatttgagatggagtctcactctgttgcccaggctggagtgcagtggcacagtctcagctcactacaacctctgtgtcccaggttcaagtgattctcccgcctcagcctcctgagcagctgggattacaagtgtaccaccacacccagctaatttttgtatttttggtagagacgaggtttcaccatgttggccaggctcaaactcctgacctcaagtgaggccttggcctcccaaagtgctgggattacaggcgtgagccaccatgcccagcctcctattttatgtttttgagacaggatctcactctgtcgcccaggctggagtgcagtggcacgatcttggctcactgcagcctcgacctctcaacccaggcaactccccccttccacctcccgagtagctgggcctacaggcatgtaccaccatgcccagataatttatttttagtttttgtggagatggtgtttctctatgttgttcagttcggtctcaaatagctagtgagatctcttttgcagccccagaactgaatgatggcaacagcacggttgtatgatggtgctcaggcctccctcagattgagggatagaatatgggaataggcttgacccacagcatacccagtagaaggggacccaggaggccagagaaccatgagactcttgtttctgtgaggttggtgaggagtggagggattcaaaggaaggacagtgcctccagcatcatttggcattactgtgtctctggaactattcatgttggtccctgcctttcttctatggctccccttcactatctagatctgtacctttgggactttgcctgtgctacagacaaagaacctggagaaataattactaacatttgaatgcttataatgcaccgggcaccgcgctgaaacactttacattcattcactagctcatttaatgctccttcaaccctatggagtgggataatgatttccatttatttatttgtttgtttgtttatttatttatgttttgagacggagtctcactctgtcgcccaggctagagtgcagtggcatgatctcagctcaccgcaacctccgcctccagggttcaagtgattctcctgcctcagcctcccgagtacctgggattacaggtgcacaccaccacgcccagctaatttttgtctttgcttttttttttagtagacacggcgtttcactatgttggtcaggctggtctcaaactcctgaccttgtgatctgcccacctcagcctcccaaagtgctgggattacaggtgtgagccaccacgcccagcctccattttaattttttattatttacttttagtgacagggtcttgctgtgttgcccaagctatagtgcagtggtgtgatgacggcccactgcaacctcaaactcctaggctcaagcgatcctcttgtctcagcctcctgagtcgctaggaccacaagtgtgtgccaccacacttggctaattaagaaaaagttttggctgggtgtggtagctcacgtctgtaatcccagcactttgggaggccgaggcggacagatcacctgaggtctggagtttgagaccagcctggccaacacgggaaaacctcatctctattaaaaatacaaaaattagctgggtgcggtggcacgcgcctgtagtcccagctacccggaaagctgaggcaggagaatagcttgaacccaggaggcggaggttgcagtgagctgagatggcatcactgtactccagcctgggtgacagagcaagactctgtctcaaataaaaaaaaaaaaaaagagaaaatggtttttgtatagagatggggtcttgctgtgttgcccaaactggtcttgtacccctgggctcaagtgatcctcctgccttggcctcccaaagtgttgggattacaagagtgagccaccatgcctggctgatttccattgtatgaacaagaacatggatgcactgagacttagtgacttgtccaatgtagtaagcgatgaacggggatctgtctcacgtcaagtctaggctctttctatgatattacactgtctttctagccagttcccagctctgggactcttgtagggatgccaggtttaccccagccagtttccctgacccatgggggcctggccagcaggacattcactacccaggaggcccgtctaggacattcctccctgaatcagatgccgcagactggatacctccaggaagcccagtgggttgacacttatgtcaactctgggccaaaggagtctccgggatgtccttgccttgggcagaagctggggaccacacagccagctgactctgctgccctgcctttggggctacagcatcttgccactgggccccccaaactatcctttccctcaatacctgctcatttgctcaggcccccg

SEQ ID NO: 97642 - DNA, 30505 bp, Homo sapiens
  misc_feature (1)...(30505): n = A,T,C or G
tatatattgaatatatatgattgtatatatcgaaaatcctaaatagtgcataaaaaatcctattagcactaataaaccaattcagcaatcaatacaggattaacataaaaaaatccactgtatttctttttttttttttttgagatgaagtctcactcttgttccccaagctggagtgcaatggcgcgatctcagctcactgcaacctccgcctcccaggttcaagcaattctcttgcctcagcctcctgagtagatgggattacaggcacctgccaccatgccagactaatttttgtatttttaatagaggctggatttcaccatgttggccaggctggtctcgaactcctgaccacaggtgatccacccgccttggcctcccaaagtgctgggattacaggcgtgagccacggtgcccagcttgtatttctatatactagcaacaaacagcctgaaaatgtaactaaggaaaacaactcgagccgggcacagtggctcacatctgtaatcccagcactttgggaggccgaggcaggcagatcacctgaggtcaagagttcgagaccatcctggctacatggtgaaaccccatctctactaaaaatacaaaaaattagctgggcgtggtggcaggcacctgtattcccagcgactcaggaggctgaggcagaagaatggtgtgaacccgggaggtggagcttgcagtgagccaagattgggccacttcactccagcctgggcaacagagcaagactccatctcaaaaaaaaaaattagctgggtgtggtggcaggcacctgtgatcccagctacttgggaggctgagcagaagaattgcttgaacccgggaggcagaggttgcagtgagccaagattgtgccattgcactccagcctgggtgacagagcaagactctgtctcaaaaaaaaaaggaaaagaaaaacaattccttagagaagcatcaaaaataatacttatttaaccaagaatgtgcaagacttgaacagtacaaaatactgttgaaagaaattaaagacgtaaataaatggacagatccttcattcatgaattggaagacttaatactgtttttttcttctgttattgttgttgtttaagatggagtctccctctgttacccaggctggagtgcagtggcatgatctcagctcactgcaacctcctcctcccaggttcaagcgattctcctgcctcaccctctcgtgtagctgggattacaggtgtgcaccacctccgactaatttgttttttatttttagtagagacggggtttcaccacgttggccaggctggtcttgaactcctgacctcaagtgatatgcccgcctcagcctcccaaagtactgggattacaggcgtcagccaccacacccagccagaaggcttcatattgtaaagatgacaatgtgccccaaacagatctacacattctatgcaatccatatcaaaattcaaactgtcttttatgcagaattggacaagccgatcctaaaattcatatgaaattgcaaaggatccagaaacaaaacaaacttgaaaaagaggagcaaatggtgaataactaccacttcctgagtttaaaacttatcacaaagctataataatcagaacagtgtggtactggcacatatacaccaatggaacaggagagagagctcagaaataaacccttacatatattgccaattgattttggacaaaagtgccaagaccattcagtggagaaaaagcagtcttttaaacaaatggtgctgggaaaactggaaatccacatgcaaaagaataaagtggaccctcacctaataacatatacaaaaattaactcaaaatggatcaaagacctaaatttaacagctaaaactacagaactcttagaagaaaacataggtgaaaatcctcataactatggatgaggtggtttcttaaacctgatgacaaaaacataggcaataaagaaacaataaattgcactgcatcaaaatttaaaatgtttgtgcatcaaaggacactatatcaagtgaaaagacaacccaaacaatgggagcaaatatctgcaaactatatacttcataagggatgatatccagaatatataaagaaatcctgggccgggtgtggtggctcatgcctgtaatcccagcactttgggaaaccaaggcgggatcacctgaggtcaagagttcgagaccagcctggccaacacggtgaaaccctgcctctactaaaaatataaaaattagctgggcaccacgtggtgacaggcgcctgtaatcccagctacttgggaggctgaggcaggagaatcccttgaacccaggaggtggaggtcgtgccattgtactctagcctgggcaacaacagtgaaactccatcttaaaaaaaaaaaaaaggtccaacgcaaatccaagagaacttatcagtcctgaatggtggcaaggtggacgtctgtaagatgctccggaagctttcagatcaggcctgatgccgacatggcaagcagcactgggtggagcaggggacggaacgagggctgggggcaactggagccctctgagccttgaagccctggaccactcagttcttctactcctgtttcctcctctgtcagatggtgtgactgcagggcctacctacagggctgttgcacagatgaatgaaagtatatgaaacccttggagcagtgcctggtccagagggagcaccacagggatgtgtcagatctctcatcaaagggatcaggaattcgagacctgggtaatatggtgaaatcccgtctctacaaaaaatacaaaaattagctgggcgtggcagtgcacacttgtagtatcagctattagggaggctgaggtgggaggatggcttgggccagggaggcggagattgcagtgagccgagattgtgccactgcactccagcctgggtgacagagcagcaagacgctgtttcaaaaaaaaaaaaaaaaggaagacattcaaagaactagaactagaactagggatggttacacggtcagcctgaactattggctaaaaaagaaaattacctactagaaggcttggtaaatatttcttctaagagaaaagtaaaaaggaggaaaaataaagctatgcgcttagggaaatagagacattacagtaataattgttcatatttgaatatggaagaggtattaccattaaatgtgttacctattatgacacagaagttactcttttttgtcctcacatcggacttggacttccaaaaagttactttttaagtaatttcctaatcagttagattagagatgcaactatgaagtattcataattggaaaaaaccagtaacttctggaatttgctttaaaatggcccaggaaagaaaaaaatagggcagggagaacagacaaaatgagactgggaaaatattaataaatgacgacattggatgatggaccgtgggcggtgattatgctaaactctctaatttggggtatgtttgaaaatctccatgaaagtaaaatttaaaagttgaactctagagaataaaactaacaacagggccaggcgcagtggctcacgcctgtgatcccagcactttgggaggccaaggtgggtggatcacgaggtcaggagttcaagaccagcctggccaagatggtgaatctccgactctactaaaaatacaaaaaattagccgagtgtggtggcgggcgcctgtaatgccagctactctggacgctgaggtagagaattacttcaacccgggagacagaggttgcggtaagctgagattgcgccactacactccagcctgggtgaggagagtgaaactctgtctccaaaaaaaaaaggccaggcgcggtggctcacgcttgtcatcccagcactttgggaggccaaggtgggcggatcacgaggtcaggagattgagaccatcctggctaacatggtgaaaccccgtctctactaaaaatacagaaaattagccagacatggtggcgggcgcctgtagtcccagctactcgggaggctgaggcaggagaatggcgtgaacccgggaggcggagcttgcagtgagccgagatcacgccactgcactccagcctgggcaacagaacaagactccgtctcaaaaaaaagataaaaaattatagtaatataaaaattagctgggtgtagtagcgtgagtctgtagcccagctcctaggggggctgaggcaggaggatcggttgagcccaggaggtccaggctgcagtgagccaggactatgccactgcactccagcctggttgacaaagtaagaccctgtctcaaaaaaaattaaaacaaccaccaaaaaaaaactgacgataggctggagacctactctcttccacataagccttgcactgctgctcgggctgcagtacagtggctgcatctccactcactgcaaactcggcctcctgggttcaaccaattctcctgcctcagcctcctgagtagccaggaccacaggtgcgcgccaccacgaccggttcatttttgtgtttttaaggagatggggtttcaccatgttgaccagcgtggtcttgaactcctgacctcaggtgatctgcccgcctcggcttcctaaagtgctgggattacaggcgtgagccaccgcgcctggcctccttccatgcttcttgattcaccccagaaggaagacgtagacgcctgaacacagacacagctgtcaaagcacgcctgccccaggaagctgagacaaaactgcaaagcaaagggagggccgatcctgacccgaccctgtgtgcgtgccccttacgcccctaaggttggcatctgacaacaaagggctttacctgcagttctccttaaagcggcactttccctccaggaagaacgggcacggcttcagagacttgtgagtggggtacaggtaaagcacacggacacccgccgagccatcctccgcctcttccgttcccaccaccatggcgttgtgatactccagagtgccccaggagctgtagtagggcgcgctcacctttgtcccactcagctcttcctcgtcctctccctcttcctcctcctgcccacctgccgcagattctggccccgcctctgctttaggaacggtctctgatccggacccacgggccgctgctggtgcctccaccgcctcagtgatggcctcccggaaagcctggtactcagcatcttcctggcggcccgggcgctcttcgtccagcgcggccaacaacctgctcttcctgacagacaccaggctggcctcggtgagctcgatgagctccttcaggtccccctgcagctggcgcaggtcagcctgctcagacgaatccaggccggcgcccaaggccagctccacctgctgcagctgcgcacggtaggtctgcaaggccgactccaggctctcctcgtccatgctgagagagggaggcgctggaccagggctgcaagaagagaagccagctgagccccgcgtctcgggaccgaccccacagcctgagggcgggcacgggcacgggcacgtcccctttccctcggggagacaccggctcagaggcacagctcccagcgcagaggtcgcagcccgggtacccccgctcaggctccgcgcttcccttccgagccgccgtgggctcgccgctagccgggtcccgcgtcactccggagccccttccccgcggggcgccccgccgcctcaccctccgccgagcccacccgccgcgcccgccgccttccaggccggccgcgcccccccgcccggcgtctcttctgtctggccagggccgcgtccccgcaaaccgcggccacctggtccccggccgggcacctcctccgcgcggtttcccagccgcagccacagagagcccgccggcctcaccggctagagcggcccggcgcccccttttcgccccagcagccgatcggcacttcctcccgagcgccgccgcttccggaagtgcttggcgcgcgggggcagccgggaagcggagcgcggaggccgctgggacgcggttcagctcattccctgaggccggcccgcgtcccgtcaggcgccgcgcggggttagcgcggggtcagcggaggtcagcgggggtcagcagcagcggctccgagggcgcggcggacgcaggtaggccgcaggctgtgcggtgaggcgcgaggcccgaggggcggcccaggactcgaggtgggacgcgggtgtgacaggagccagctttggctgcttgtcggggagcctcagacctggcggcggcggcttggggcggacgtagccgggggccgcgacccasgttcttccttcgcagtcgttccctgccagccgcgcgccgcctccaggtgcactccaggagcagccgcgccgctgctcacccgccctgtagtccgctccccccagggccgtccccgttttaagaaatggggtgatggggcgtccctacccggcgcctgcaggggctcctggggagcgcgccggtggctcgctgctcccgggtggggcgcggggctggcgctcgagggtgccgtggcccaggcggggctgcagcgagtgtgttccccgttccgcgcgcgtgaagcgtgggagcgaagcctcgggggagggcgggagcgcggctgagctcactgtgaacacccggctgggtagtcccgcgagcaggggaggggccggaaccgatgtgtatgcggagaggtcgcagtcattgctgtgagcaggacacagtggcggctgacctgggagaagttacagagggacggggtgggagagggacgaggagtcgggaatggcccccaggctctcgtcctgagcggtcggctggacgtggggcgccactgaccaccgtggagaagcccgggggaggggaggtgctttctggctgcacactgacctatgttggggtgcccagggcaggatgtacacgctgctgtcgggcttgtacaagtacatgtttcagaaggacgagtactgcatcctgatcctgggcctggacaatgctgggaagacggtgagtgcccacgcccttgcgcgcacctttcccacggcctggcggcgcccccttcggttttgtgctgtcagctgcacgttcactacccagacggaagccaaatttcacctgagacggcaggatagtcaccaccagcctcctgaagagcagagtgttgctctgtttctgtttctgtcttttaaagaacagacctgagtaaggatatytggaagccagtatagcccctccttgatgtgtttcgcctctgcctctctcctcagaccttcctggagcagtcgaaaacycgatttaacaagaactacaaggggatgagtctatccaaaatcaccaccaccgtgggcctaaacagtaagggtctcaatagcaggctgtgggtttggggccttgaggatgccgtgatattcacagtccagctggcccgtggccacagccctgtcgggcccctctcaagtctcatttgagtggcaccagcatggtttgccccatcccctgggagagctgggactgggtgtgtcgaggaccaaggtcatgagccttgcctgtttcctcctctccccagtcggcactgtggatgtgggaaaggctcggctcatgttctgggacttaggagggcaggaagagctgcagtctttgtgggacaaggtaagactccctggccaggaccacccccaccccagccctccagtgccacttctttccagagtgccctttgggcccttcctcagcagytttccttacccactctgtccctcgggttttctctctggtcctgtcccaggttcccgagtggctccctgttttgtcccagctgaacccttagctgaagttgccccaaaagtggtggtaggggagtttcccacttgggagttccctgcgatggggccagtggagaattccagggaaagaatcactaaatgccaaggcgatcagatcagagcatgtatyaggggaacctgttgacagagtgcggcatcctcaggtgaccagtgagagaagggcgtgttcactggtcatgcctgaagccgggggggatctgggttcagggctggggctagtttctttcaatgttttgaaacctgaacattatgttaacaacctaaacatcttacaagtgtctgggaatgttcaaaccctggcttgggtttgagcctaagggcaacctcgctggccaagtcagagaggtcagggcagtctgtttctttctcagtcaggacaagacaaagtgtggggacctggggaccctgcactcctccaaagtgagtgcctcctttcggctcagagaccttgctgctgaccaccacaggacacagaaatggcaaagaccagatgtggggacggcaggatggctgcctctcccctgatgaggttccttcagttctagcttaacatttgttcttccatgatcaccagaagactcctcagggtctcacagcggcagtctcctattttgacacaggttttgggcatttctgagatcccagtgtggtgccccttccccacacccccaaggctgcagtttatctccttctcagcctgggccaggcactgagtccagcactgagcagggcagagcctgtggcttcctcgggctccctgccctaggctggcacagtgggtgtggggtgtccccagtgccttggctgccctgatgccatctctagagctgagtgcccaggtcctgatctcttttttgatcctagttcccctttcctaggcgcccccaaagtgtcccctcctgctgtgacttctagccaagaagacatttctcccatggccaagtgatctctgatagatcctgtaggaccactgaagtcagacaggacaagttgagtcagggcctgtgtgtccagtgcgcagcatgcttggggagtgacacagatgatgatgatcttgtcacaggccggtgtctcaggcacagatgctgagacaggtcgaggtacaggatgcacactgggggtcggcaccaggaaggcagggaggacgggagaggagaggtcgactcaggcagcaggatccrcagagctgtggttggcccagcagggagccctggaggagaactggctatgctgtgccatgtggggccaggctggccrggacttcacaccatggcctggtgggtccccagtgtgggctgccctgggcaggtgtgacctggcagtgtggctctttgcagccaaagtgggtcccacagaaaccaaaatgagaccatctgctggtgcagtgttctccaacatgaagcaagaatacagtggggccagagatgcctgcactggccacagctgcagccctatgtggacccacacttccacgttggagaggggttcctccaaggtcctgagggcctctcttaaggcgaaactggaagagggagacttaagggggccactgtagcccatccttgctgctggtcttggggctgcacagcccttccttgagtgccctcccaattcactaccacttctgctggggtgcgacttcctggcagtctgagcccttctccagacaccaccgtggtggggccagtggctccctgggtccccagctgtgggacagctgtgggatggcagccccatctcctgcccaccagggtctcctagacatgaggtgcaagtcatgcccatgaggcagctgtggctcgtcattcagcgtgtctgctgagtatgtgctgctctagtggccgggacccctgaccctgctgagctcagagctgggaggatcagctgcagggacccccctaggtcactgggagggaccggaagggaggcccctgctcccaccctggttcctgtatcctgcatccttgtgcagagccagcaccacagaaaggggcgtcattgcgaattggcctcgtcctggggctggaccctgggttggtgtccacatgtgtggcatgtgccaggacctcagctcctgggttctttgctgtaacactagtctctcaggctggctggcactttgcagttggggagctcccattgctgctggggagaaaaactcagacccacagtccctctgactgctccactggggtcagctggccagccaggagccacgctkggacacctccctcttccccctccttgtggggcaccccacaatgaccactgctgtgacgcctccactggggcgtggggctctgggtcctgcccgcactcagccctgaggtgtcgctcccgtccactgcggccctgctgggctgtgcaccttgtgcctggtaggtgtgatgggtggctctggccacgtggtcccatggtccaggacccggttgcacatgaaccttctgccaccctgctcagaagccccaggagccacgtggagattctctcactgggcttgctgcagcctccacagagccgcccctcctgccacagaggtctccaccttagggtccgcctgctcccttgtgtcagcagcagacagccggcacactgcagggtcccttgaggggttggcggcctctgtgtgggacctgtctgtaggccagagaagttcctgggggtgggggggcctcgctacctgcagaaccctggagggcgcctggccttgggcctcctctccactgtgggaagttcctgggggtgggggggcctggccttgggcctcctcctttccactgtgggaagtgcaggtgcacaggcttctctcctctgtgggaagtgcaggtgcacaagcttgtctggcactgggatggggttgtctggtactccctgctcagacaccctaaggatttcggagagttgggctgtgcctcctggcttctcatgctctcgggtgtgtgtgtcttaacacactgaccaccagcttgtcctacctggtcagcatccagttctaggtctctgggcactcatgcctggacaggagagctggcacagcctggaggcaaagtggcaaatgtgagctgttgtctgctccacgtggacgcggagtttgctgtgtttttttctgattgagatagaggtgcactcatctggtccagggctcagcacttgtacctgaggctgcaggggctgtgccctgtcttgcccaggagtgttgccagcgagcccaggactgaccagcccaggctgcagaggtctgagctcagtgactctggccctgtcctggcagggaaggctcgcttcgtagatggygctggtcagtcttatccgcatggccacactccctccctgtgcgaggtgctggcacagagccccacaggtgcactccctcaacgggccaggctgtggtctaggttcctccagcccccaaaccctatcttttttttgagacagggtctctcattctcacccaggctggagtgcagtggtgtgatcagagctcactacagcctcaacctcccaggctcaagccatcctcccacctcagcctcccgagtagctaggactgcaggcgcacattaccataagcttttgtacagacggagtctcactgtgttgcccaggttggccgtgaagtgggctcaggtgatcctcctgcttctgcctcccaaagtgttgggataataagtgtgagccaccacgcctggcccaatccctgtctttcacctttggccaccatcaggccaaaggttgccggcaggttctcaggagcagcgtctggggacacctccaccagatctccccgcaaccccagaatgcatcccagaagggtcttgcagttgggggctgccctcttgccccttcctcatgtgagcccctcactgtggccatgacacaggcctggctctgctggcccttggcagggtggggactgagccccaactcctggtgcttcctcccagtattatgcggagtgtcacggcgtcatctacgtcattgactccaccgacraggagaggctggctgagtccaagcaggcgtttggtgagtgcggcctggctgctctgggagggatggatggtgagtgggggcaggtccagcttgggcagctctgtgcctggggcaggctcagtgtctggtcagaagtgctcctgcctagtgggtgacggggggggggggggcagagggagtggctgtcacagtgtccacgcctgtgggcccctgggcagtcagaggcaggatgctgggtgtgaggcgctgcctctcctgccctccccagagaaggtggtgaccagcgaggcgctgtgcggtgtccccgtcttggtgctggccaacragcaggatgtggaggtgagccccacccctgcctcccgcagcagcttcccgagtccccagcctcccccacagcaaggggagyaggtgtgcacccagacaccccaggcccagtgactgcccagggggtacagagccattctcaaggcctgccctgcccccagcagcttcccaagcytggttcctctccagacctgctgctgccagccctggaggttctcccacctcagggcaggcgcccagaggcctcttcctgctatgcagggcacctctccccaggagggcggccgtgtctcaggagtgtgtggccaagctgtggggacacccaggtgaaactcagagctcaaagaagtgatgctggggccctggtgggagtcagctctgacccttacctgttcctgctacccttggaggtggcatctgtgccagccccacccccagggcagcccctcaagacccctctgaggtgccactgcccccgggagcactggccacgctgagttctagctgttctcttggagtggctttgcacagaagcagcccggcgtccagagggccrggtgaatcttcacttcctgccttctctggggtggctctgttgcccccagcctgtaaggctggcctcccctacaatctcagccgacaagagggacatctggtacggggcaggggtctcccctcggaggaaaaggggaggggagggctgctttttgaagactgggcaggtggttgtgagcagaagccaccatgactgcagactgccyccatcactgatgcagggctcccacctctccatcatccccggctgtgtgggcccctgggacctgcctccgccactgcccaggaggcctcagtcctcagcgccccacctcggggctcagggtgtcccccagggaggggatggggggtggactccttggagccgtgtggacgtctagtttgtctcaggcactaccagccatgttcagcctcgggctgagcacagggtcctcactgctgtggtctctgtgggagacactgggaccctggtggagctctggctgtttccctggggtgaagggcatacgcccttctgagagtcccgggcccacaggcaggacagggccagacgtgggggctgctcctcacggccttacctcccccagacgtgcctctcaatccctgacatcaagacrgccttcagcgactgcaccagcaagatcggcaggcgmgattgcctgacccaggcctgctcggccctcacagggtgagtgggggctgcacctgygggggctttggggaccgagaccccccgcctcacacccgctgtcttcacagcaaaggggtgcgcgagggcatcgagtggatggtgaagtgtgtcgtgcggaatgtgcaccggccgccgcggcagagggacatcacgtaggcgcagccgcgctgccgtcgggacggctggtcccctggtgctggaggagtggcctcctgttggctcccatgctgctgatctggggggtgggtttgctttgctttggggttcttctatttactttgttttctcgaagacaaactttcctctatgtctggaaaagcgtaggcatccggaggctttggaggggagtctggcagcccggctggcccaggccctgcagcggcagcctttccacagggcgcagcggcggcctttcgaggccctttctggggggtctgagggagacctggttgggaattggggctccagtgctcaggctggcttgggctgcatgaggacagccctgtgggaccctcgggagaccccgtggctgtctccgccccatcgaggaggaggcccgtcagccatggctgccatctggcttctgccctcgtgaccccgtgaccccggaagtggtctggggctgatcttgccttgaggaagacccaggccatgttcccaaaggccagcgggggccctggattgtgatgcagcctcgggacagggctgaggcctgcgggggaagacctataccccacgcctgggcctggcttcacctcaccctaatcccccgggagggagctgactgatgcaaaaagctgagggggcctgctgggagtggctgtttttatgccccagccccgcaagttggggagtgtttgtgggggtccagagccctcccccagccaggagagaacctcccggaggggttctctgtggggccctgtgtcccctgctcgggagtaaggctggtcctggggtcctccctgcacggaccccactgggcctgccgagtgctgtgttcttcctcagtctggctgtgggcaggagcggcctgcccagtgtcacccagggtgagtgcaaaataaagacggcgagtgtggctctgtccatcccttccctcctggagggtggaggctcctggctgttggacacggtgatggtgttactgggctgctcaggggctggtgggcaggtgaggggctccccaggtgggcctggagagtccaggcactcccttcctgcggatgtgggaaggacatggggtcctgggaggagctgctgggaaggggcatgagtcagggtgggggtggcgcagcagctgcggggctgtgactcacaggagtcgggccctggaagtccccgcgtcctctccaggggaccctgtgtgtgttctgcaggttggttcccaggacctgggggggacctccagccccgggaacctggccgtgctggggaggcgagtggctggtgcagcccccyggttgctctgggtgcatcgggaggcttcagagcctgccccagagrgggagaagcttcacttcccggraagcatgggaggcctggaggaggtctttggcaggtcccctctcgggaaatcccctgtgagttgggagtgggaggaattcataagtggggggttagtgtgggccccggcgactagggctggcctgagccccatcctgttcttccagcaatgataccctcccaggccctgaccctcgctgagcttcaggggcccctgccacgtgccacagccactgggggcagaggtggcactccccactgatcctcccagggagggtctgtctgaggtaggggaagccccgggcagcagttctgatggcaggcagcctgagggatctgggcacagcgggcggctcaggtgtccccggctgccctcccagtagctgtgcaactacaaccagttttatgaaaaagctttataaaaataagctttaagaaacctcatttcttctatttaaaaaaaagcctctttcagtgcaagtggggtgccaaggatgtagaataaataagagggggccaggatcagtgcacagggaggaagcgctcacggacgctccgctccagcccgggcatcctggccacgcgcagcgcctgcagcagccgcaccagcagcgccccgtcctgcgcccccaggagctccgtgagccgccgacgcagcttcagctgcaaggccgcgcggcccgcccttggtgtcggaccccagccctccggggcctcgagggcctgcagcagccgctgcagcctcttgatggagatgtcctggaaagccacaaagtcgatgacggcacgctcacactcctcagctcctgcagtggggtggggaggcagcggtccgatcatttcacccacacacactggcgggggctgccaggtaccctgctttctgggccccactcggggggtttgcaggagagagaaatccctgtgcagtgagccgtgctggagagggcagtgcaacgatggggactggagaaggggcaggagccttcggtcagagagctggagcaaaggcctagggggcaggagyggccactcggaccttggctgcaagaggcaagggggcccaggcaagggcttggggctcctgggccatcggaaggggcgagttgggacctgcagatggaccggacctgacttgatgttaagggggtcacttccccctgtgacttctcaacagtggttaacattgggcctcggtttccccatgtcagaggaggcagccaccttcctctcaggcagttaggagagttaccatcaggcctcggtttcyccgtgtcagaggagccagccaccttcccctcgggcagttaggagattgctgcccactttcccagagctcyccaggggaggctgtgccctggctcagatccaaattctcagccacccctgagagggcagacttggtggggatctagtggagggacccctgacccctcaaatccactgtggccccttcccagagccagctggcatgcctcaggctagatgcacgtgcaggggcaggagtgagggcacaagtgggcctggcctgcagtgtgctgccccctcaggcctctggctcacctggtaccctggtgctgagggggaagccagtgcagctggtgcacagsgtgtcatgggaggaagagcctggcacattgagggccaggcccagggccgtgcagttgcggtggggctggcactgctctgagctggarctgctggctgagaaggtgcctggggggcacggctggcactgcgtgttctggctgggggtgcctgcagccaggagggaagaacagggtcaggggaactggtgtcctagctcagggtgcaaggctgggaccagcaacctgacccctgccacacctccggccaccactcctgggggcccctcccctcgcccagctctcacccggggcaatcacgccggcaccaggtggacacgatgcgtgctccaagcagaaaccagcgtgcgcgaagaagccggtgcggcagcggcaggcrcggttgtgggtggcgtggcaagcccgtgcctcctcctcacgctccccgcagaggacgttgcagtagcggcagcgctcyaggtagttccagaactgcgtgtagtggcgcggtggacacgggccacacgtcgtggggctgtctcggcggcacggccgctgcacaaaggtgcctggggggcactgggcrcacaccagccgctcccctgtctctgcgtcccgccaggggtaggtgggtgtttctgccactccgcgtacagccggcaccggcagcagggcaggcagcgccaacaccaggcacagcagcgacaggcctggcccctccagcgccctcatggtccttgctggagcagggagagcgcggctcagcgcggacacaggaccctgctgtgcctgaccgacatgccacctcctttgcccccggtccgcctgcggaggggccgcccaagtccagaagcccatcctgctgctgccctacatatatgggcggggagagggctgggccagcctcgccacgccccataggaacccctccctccccaggcagcccccctcacccacctggtaccatccctccccagagctcagtccaagggtggttctgggaggggcctcaccagccagggagctgccctcctcagcacctggggcagctcccaacccagagaccagcccaggcagcctggtgtgtcggtggatcccctaccaactgcagcttggctgcggctgtgaggatgagggcagggctgagcccaccgtggaggaagtacagtgtcacatggcaggctgggaggggcctctgccaactccctgtccctcaactcccaccaccaagcccaggccacgaagacaccgtcctgggcactgccagcagytttattagagagccctgtcccctgattaaaagtggacacgtgcccacgggggtctcctccttcccggtgaggggctcagctggggtgcccctgtggcaccactcacaggccaggagccagggaagttctggggaagcactttcccagaaacccaccccagaccccaaggtagctcagggcttctcagaggcaggcccagatccggtcccaccgcagggaccaaccatgggccccgcctgcctgaggcctgcagcgggccaagccggctggcatgggctggcctattctgttgggtgggttcttggcccaccagagctggacaggcaggtgatcaagccacgttgggtgtgctgggggcctccgtgggcactcactggggctcyggccagaagacctgcatgacgctctgcttcctggaggcggtgtggcaggctgggcacatcctagaggcctgtgagacaaccggcccactgcacacgtctgccaggcgttgccaccaggacaagggcctgccctttccccctcagcccatcacctggggctacacccagcaggaactgtagtggccaggcaccaacctgaaggtgccgttgccagcaggcttggcagcgctggaagtcacaggcagggcactggaagggcaccacgtcctctgccccacagccctggcacacacagcctgctgagaggggcccgcccggagctcccgtggcctgctgcccagcgatgtctctcccatgaggctcaccccactcagatgctgcaggcccgtggggaggtcctgaggactggctgggacctgcatcctcaccgcccgcccccacagtccctgctggcctctgtctaaggaaggacgagatcttgctctgggtcttcccggtcttctcggaccgtgaggggcctggagacagagacttgastctgaggggggcctggggctttgctgctcactcccagggctgcgtgcggttggggcgctgccaggagcagccaggcaggtgcmctacctggttggggagccctgtgggtaagcacaggaggcacggcaagcctctcctcctggggtcccggtggctccatgccygggtagggccggccggtcaggtctgtgcacgtctgtgagaagcgctgcttgtggtgtggacgcacaaacatgctgaaccctgcggggagcttcaatcagacccggcacagcccccattttgtcccctgccccccaccccaccggctgttccccacgccagggccacttgctgtgcagcagggggaagtcctctggctttgcagtggtcagggcggccaacacagccagcaccttgtcgaggtcgtcgtcttgcttataggctgtcagcgctgccaagagttggctacagcccgcggaccccagggccctgcgggcatcagccaggtaggcgctcacggcgtgctggccctgcttccctgctctgggcactccagacccccactgtggktggctgccagggtctcctggtgtgggagtagcatggctcagagtggcgctggggtggaggactgagagtcccaccgccctgcccgcccttcctccaggaactcctggagagctgctcaggacaactgcggggtgcagaaccgggagcagtccccaccatgagatggctccccacaggggcagccccggccacactcaagagttagcctcgtgaagccactgagggacccaccaagtcgtaggctgcacacggttcaggagtcagctacctgttgggggtggcctgggcgacaggtggggcctgccctggttcaggtgctcttgggggtycagctgctgggctgcagccgtggacacggtcagcttgggatccggcgccgttcttcctgatgaagagatgtagagccacaaagctggtcgrgagcatctggaaagttccctggggtgggggggcagggctggctagggaggccaggcctcacccacctcagaccagggcgggaaaacccaggcaggtacacgcctgggtgctgggggcatcagaggagacaccagcctgctggatgggggctggaacagtggcgggcaggccaaagccccactcaggagctcagagccgtaggctgggtgcaggcatgaggatatcccagtgagtaccaagcccagaagggatctggggtcgtcccaacaggctaggttcccccctgggtgaactaggggaactctgtaggggctgttcattaacacacgaacacagatgcttccgcctctggagacttggactccaccccaaacagaggcagaaacagggaggacaggggtctaggaccctaggaccctggcgtgtgcagttgaccccccaggaccatgcatgggaggcaggggacgtgtggcagttggacagggctgtgcttaggggtcggggctatggcagggacagggctgtgcatggagttgcacagggtctccccaacaagtgatgctgctgctggtggaggtggaggtggtggtggtggtggtggaggtggtggtggtggaggtggaggtggaggtgnnnnnnnnnnnnnnnnnnnnnnnnnnnnnnnnnnnnnnnnnnnnnnnnnnnnnnnnnnnnnnnnnnnnnnnnnnnnnnnnnnnnnnnnnnnnnnnnnnnnnnnnnnnnnnnnnnnnnnnnnnnnnnnnnnnnnnnnnnnnnnnnnnnnnnnnnnnnnnnnnnnnnnnnnnnnnnnnnnnnnnnnnnnnnnnnnnnnnnnnnnnnnnnnnnnnnnnnnnnnnnnnnnnnnnnnnnnnnnnnnnnnnnnnnnnnnnnnnnnnnnnnnnnnnnnnnnnnnnnnnnnnnnnnnnnnnnnnnnnnnnnnnnnnnnnnnnnnnnnnnnnnnnnnnnnnnnnnnnnnnnnnnnnnnnnnnnnnnnnnnnnnnnnnnnnnnnnnnnnnnnnnnnnnnnnnnnnnnnnnnnnnnnnnnnnnnnnnnnnnnnnnnnnnnnnnnnnnnnnnnnnnnnnnnnnnnnnnnnnnnnnnnnnnnnnnnnnnnnnnnnnnnnnnnnnnnnnnnnnnnnnnnnnnnnnnnnnnnnnnnnnnnnnnnnnnnnnnnnnnnnnnnnnnnnnnnnnnnnnnnnnnnnnnnnnnnnnnnnnnnnnnnnnnnnnnnnnnnnnnnnnnnnnnnnnnnnnnnnnnnnnnnnnnnnnnnnnnnnnnnnnnnnnnnnnnnnnnnnnnnnnnnnnnnnnnnnnnnnnnnnnnnnnnnnnnnnnnnnnnnnnnnnnnnnnnnnnnnnnnnnnnnnnnnnnnnnnnnnnnnnnnnnnnnnnnnnnnnnnnnnnnnnnnnnnnnnnnnnnnnnnnnnnnnnnnnnnnnnnnnnnnnnnnnnnnnnnnnnnnnnnnnnnnnnnnnnnnnnnnnnnnnnnnnnnnnnnnnnnnnnnnnnnnnnnnnnnnnnnnnnnnnnnnnnnnnnnnnnnnnnnnnnnnnnnnnnnnnnnnnnnnnnnnnnnnnnnnnnnnnnnnnnnnnnnnnnnnnnnnnnnnnnnnnnnnnnnnnnnnnnnnnnnnnnnnnnnnnnnnnnnnnnnnnnnnnnnnnnnnnnnnnnnnnnnnnnnnnnnnnnnnnnnnnnnnnnnnnnnnnnnnnnnnnnnnnnnnnnnnnnnnnnnnnnnnnnnnnnnnnnnnnnnnnnnnnnnnnnnnnnnnnnnnnnnnnnnnnnnnnnnnnnnnnnnnnnnnnnnnnnnnnnnnnnnnnnnnnnnnnnnnnnnnnnnnnnnnnnnnnnnnnnnnnnnnnnnnnnnnnnnnnnnnnnnnnnnnnnnnnnnnnnnnnnnnnnnnnnnnnnnnnnnnnnnnnnnnnnnnnnnnnnnnnnnnnnnnnnnnnnnnnnnnnnnnnnnnnnnnnnnnnnnnnnnnnnnnnnnnnnnnnnnnnnnnnnnnnnnnnnnnnnnnnnnnnnnnnnnnnnnnnnnnnnnnnnnnnnnnnnnnnnnnnnnnnnnnnnnnnnnnnnnnnnnnnnnnnnnnnnnnnnnnnnnnnnnnnnnnnnnnnnnnnnnnnnnnnnnnnnnnnnnnnnnnnnnnnnnnnnnnnnnnnnnnnnnnnnnnnnnnnnnnnnnnnnnnnnnnnnnnnnnnnnnnnnnnnnnnnnnnnnnnnnnnnnnnnnnnnnnnnnnnnnnnnnnnnnnnnnnnnnnnnnnnnnnnnnnnnnnnnnnnnnnnnnnnnnnnnnnnnnnnnnnnnnnnnnnnnnnnnnnnnnnnnnnnnnnnnnnnnnnnnnnnnnnnnnnnnnnnnnnnnnnnnnnnnnnnnnnnnnnnnnnnnnnnnnnnnnnnnnnnnnnnnnnnnnnnnnnnnnnnnnnnnnnnnnnnnnnnnnnnnnnnnnnnnnnnnnnnnnnnnnnnnnnnnnnnnnnnnnnnnnnnnnnnnnnnnnnnnnnnnnnnnnnnnnnnnnnnnnnnnnnnnnnnnnnnnnnnnnnnnnnnnnnnnnnnnnnnnnnnnnnnnnnnnnnnnnnnnnnnnnnnnnnnnnnnnnnnnnnnnnnnnnnnnnnnnnnnnnnnnnnnnnnnnnnnnnnnnnnnnnnnnnnnnnnnnnnnnnnnnnnnnnnnnnnnnnnnnnnnnnnnnnnnnnnnnnnnnnnnnnnnnnnnnnnnnnnnnnnnnnnnnnnnnnnnnnnnnnnnnnnnnnnnnnnnnnnnnnnnnnnnnnnnnnnnnnnnnnnnnnnnnnnnnnnnnnnnnnnnnnnnnnnnnnnnnnnnnnnnnnnnnnnnnnnnnnnnnnnnnnnnnnnnnnnnnnnnnnnnnnnnnnnnnnnnnnnnnnnnnnnnnnnnnnnnnnnnnnnnnnnnnnnnnnnnnnnnnnnnnnnnnnnnnnnnnnnnnnnnnnnnnnnnnnnnnnnnnnnnnnnnnnnnnnnnnnnnnnnnnnnnnnnnnnnnnnnnnnnnnnnnnnnnnnnnnnnnnnnnnnnnnnnnnnnnnnnnnnnnnnnnnnnnnnnnnnnnnnnnnnnnnnnnnnnnnnnnnnnnnnnnnnnnnnnnnnnnnnnnnnnnnnnnnnnnnnnnnnnnnnnnnnnnnnnnnnnnnnnnnnnnnnnnnnnnnnnnnnnnnnnnnnnnnnnnnnnnnnnnnnnnnnnnnnnnnnnnnnnnnnnnnnnnnnnnnnnnnnnnnnnnnnnnnnnnnnnnnnnnnnnnnnnnnnnnnnnnnnnnnnnnnnnnnnnnnnnnnnnnnnnnnnnnnnnnnnnnnnnnnnnnnnnnnnnnnnnnnnnnnnnnnnnnnnnnnnnnnnnnnnnnnnnnnnnnnnnnnnnnnnnnnnnnnnnnnnnnnnnnnnnnnnnnnnnnnnnnnnnnnnnnnnnnnnnnnnnnnnnnnnnnnnnnnnnnnnnnnnnnnnnnnnnnnnnnnnnnnnnnnnnnnnnnnnnnnnnnnnnnnnnnnnnnnnnnnnnnnnnnnnnnnnnnnnnnnnnnnnnnnnnnnnnnnnnnnnnnnnnnnnnnnnnnnnnnnnnnnnnnnnnnnnnnnnnnnnnnnnnnnnnnnnnnnnnnnnnnnnnnnnnnnnnnnnnnnnnnnnnnnnnnnnnnnnnnnnnnnnnnnnnnnnnnnnnnnnnnnnnnnnnnnnnnnnnnnnnnnnnnnnnnnnnnnnnnnnnnnnnnnnnnnnnnnnnnnnnnnnnnnnnnnnnnnnnnnnnnnnnnnnnnnnnnnnnnnnnnnnnnnnnnnnnnnnnnnnnnnnnnnnnnnnnnnnnnnnnnnnnnnnnnnnnnnnnnnnnnnnnnnnnnnnnnnnnnnnnnnnnnnnnnnnnnnnnnnnnnnnnnnnnnnnnnnnnnnnnnnnnnnnnnnnnnnnnnnnnnnnnnnnnnnnnnnnnnnnnnnnnnnnnnnnnnnnnnnnnnnnnnnnnnnnnnnnnnnnnnnnnnnnnnnnnnnnnnnnnnnnnnnnnnnnnnnnnnnnnnnnnnnnnnnnnnnnnnnnnnnnnnnnnnnnnnnnnnnnnnnnnnnnnnnnnnnnnnnnnnnnnnnnnnnnnnnnnnnnnnnnnnnnnnnnnnnnnnnnnnnnnnnnnnnnnnnnnnnnnnnnnnnnnnnnnnnnnnnnnnnnnnnnnnnnnnnnnnnnnnnnnnnnnnnnnnnnnnnnnnnnnnnnnnnnnnnnnnnnnnnnnnnnnnnnnnnnnnnnnnnnnnnnnnnnnnnnnnnnnnnnnnnnnnnnnnnnnnnnnnnnnnnnnnnnnnnnnnnnnnnnnnnnnnnnnnnnnnnnnnnnnnnnnnnnnnnnnnnnnnnnnnnnnnnnnnnnnnnnnnnnnnnnnnnnnnnnnnnnnnnnnnnnnnnnnnnnnnnnnnnnnnnnnnnnnnnnnnnnnnnnnnnnnnnnnnnnnnnnnnnnnnnnnnnnnnnnnnnnnnnnnnnnnnnnnnnnnnnnnnnnnnnnnnnnnnnnnnnnnnnnnnnnnnnnnnnnnnnnnnnnnnnnnnnnnnnnnnnnnnnnnnnnnnnnnnnnnnnnnnnnnnnnnnnnnnnnnnnnnnnnnnnnnnnnnnnnnnnnnnnnnnnnnnnnnnnnnnnnnnnnnnnnnnnnnnnnnnnnnnnnnnnnnnnnnnnnngtggaggtggtggtggtgctgctggtgctggtggtggaggtggaggcccccatcactcccataggggaacagagaggcggggccaagcagggcccgaggatgcccaccccaagcagcccaggactctggcccacactgccttccacgcaggagtctgagggtcccacctggggccccatttaccagtggggtccaggaccggctgtgcccgctgccttcggggaatgctgtgctcaggccgatagccacagcctcgtcctgtcagctggatacagacctcctcaaactgctgcttatggtggggccgcacaaactggtagaagcctgtagaggaaggggcgtctgtccccatctgcccctttttctctagagaacagagaccaccttggacccagatggcccccaccccacacgcggcggcagcactgccctcagggtgggtggcctctgcaagccagggcaccttggagcaggttgtgcttcttggggtcctcagcaaagagggggccgagacaggcggccagggcggcaaagtcatcggaacccttgtagtcctgcagggcctgggtgaaggtggcaaagttggcttggctcaactcctgcttcacggccaccatgaagagcttggccctgtccgtctgtgcaccagccacgggctcctcctgcaggacacaggcccgaggctccatcagggccagcctcatcatctggtccctggggctgcagagccttccttggaacattgagcgttccctgggacagtgactgccgaggtggggctgctgcctgagaaactggctggctggatggacatagggaggggctgcgggaagaaagctgtggggctgggcccgtctgaggtcacacagtgagaggctggcagggaactgagagcagtgaatgggcaaagggtagattggctctgcctcaagccaggggtcctgcatggcccgtctctctcctcctccctcaagccccctgccccacagcggatgcggctgaggctcccaggatggcagcgcacaaggaggggcttccggatgagcagtgcccatctctctacacaccccagaccaacacggaaacgtggaaaccaaggcaggggcggcccaggcactccccacccaggccctcgccagcccaggcccctcagcagccacccacttcctgatggcaccagccctgcctgggcaccacccagttcttcccagaagccaagggacatggacaaaggccgccacacttggggttttccagcaggcagggggcttcctggctccggctataactccgttctttgatccaaggctaggaatgggctgtgtccctcacatgaggcaggtgtgcatccacacttgagggaaatgccagggccaagcccagtgctgcaggccccatgccaaacctgcccaagggtggggcctgattccagctgggactcatgagccccctgcagaagaaaccacacacttgagcccctggccgtcagcatcacagctgccctggacatcagctcctgggggtggattccctggtcccatcgggaccagccgtggctgggggcacccacggctgcgttcccatgcgtgtctatggtggtcggcacaggtgcagggacagctcacgcaccgggtggctgaccagccggatcttcttcctccctcctcgcggttcttctgccggcctcttctcagacaggagggacagggtggagcagctgtgggcctgaggaggacacagctcacaaccacacacagaccccaaccacacactctggggtcccaaagcacctggacgcacagggaagatggtcccaaggagccctgagccaagatggaggtcgggggaggggggcacagcacaccccggtgacagtgccacaacttggtcctgtccaagtcacaccagcggctcatgaggctcgcaggtggtgacttgtaagagcaggtccagggaagacagtccgaccacagcgaggggctggcaggaaggggacacaggtgcctggtgcctgcacctggagctcactccaggggcctgaagggcagggatgggcaggaagaggggaatggctcccagcaggaagcagggagaaaatttcgggttggcctgaggaattatgggcttctggggcaaaaggccccaaggaagaaggaacctgggttccacccgcagcacattcctggagaaaggccagcctcaagcgcagccagtggcaggggcacccgaccttgagtgcactgagccaagctgacccgccagagaaccaaagtgatgtggggggcacccgcggagggccagggcatgcaccacctgggagccagcagcctgtgggtgaggtggggtggaggacccacagacagccaggcagctgggatcccccgcccgcttgcccgcctgcctgccaggcaggggatttacaggggtgtgtggggaggtgcctgaggccagatgggcggggtcgggttggcctcaggagacagagggtctgtgtccatcccaaggccctggaactgtacctgctcctcgccagggctccccgcccgctgttcgctgtgctccagggcggccagcagccccctgggcctctgccgggcaggaactggctcctgctcatactccacacacaggctactctcggggtccccggcagctggtgaccctgcaggggcacccgagtgcgcagtgaagcccacggggggccccagctggggtccctgcctgtggcaaagcccctcttgggggagagtcccagcacttggggtcctgcctgtgggtgtcctccctgctattggggggagtctcagcctcggggggcatccttgcctggggcgttctctgcctgtaggggagggttgcagcccgtgggggccctgccctaggagggagaggcagcctttggaggtgggaggggaagcgcacaaagccaggtgagtcgcctccgccctgggcgcctggtgctgcccgccccacgccgcccgctccgccacccccacaccgcccacccagcgctgcccgtccgcacctgaggacctctgcttcaggctggggacatgcaggtccagactcttagctttcctggtggagaagaaggggccaggcgacttggcctcgctgacagcatcttctccacgcacactgggtgctgtagcccggggggccggcgctggcatctgcagaaccatgggggtgggtggacccatttctggctcctctggggacaacaccctcatcccctccctgggcaggaactcacagttcgctcggcaacacggaagaactgggccacgtctcggatgacatggccaaagttgtcatacaccctgacgtggggacgcacccaggagggcagttgggctcttgcgtcggcaaaggcgaacctggggggtggccatagccctgctgccctgcccacagccgcttcaagggttcagttcaccgaagtgaagaccctcatctgctgcaggggccccacgctgaccccgagtagccggagaggctctggaggagacggggcctcatgtggggaaggagagtccaggggcccagtggggtgtgggcgtgtcccctggcgccgcgcctgccaccggactgcacgcacctgtggtcacagaggaagacagctccgtagtcctggcggtgccggatcactcgcccgatggcctggttcacagccctggacgcctgctgccggtaccactcctgcccagagaggaactgtggggcgaggcggctcggtcacgggggctcccttggccacggggcgggggctcagtcaccagaccgccttaccccagccccaccctgctgtaactcacctggcccccagccccaccctggcccttcatctcatccaggaactgcatcttgaggacaacccgggggtccatgcgtggggggtacgggaggcccgtgacaatcacaccacggccattcgtgtctgagaagtccagcccctcgctggcctaggggacacaccagggagctgcctggggccgtgggggctcctctccctggtgcccacacccagcccagccaccttccccgaggctccgtccccaaccaggggtgggaggaagctccatctgtgggtcaggaccccacttggggtccacagctcccagacgccacctccaactcttgtggccaggaaactcccatcctgcctgcccaggcccagagcaggacacgctcccagcagggccagcagtcgctctcgtgggacccaaggaggggaccgggcagcccccagggcccagagtctgctggggagccataagcacccaccagggaacaggcaaccaggtcagggcagagggccctggagagctcaccttgccccggcagaccgccaggaaggtggcgccggtggacccaggggcggcaacccttgcatagtaagcactgatggtctggaaggaaagttggtgaggctgagcctggagcccccccccagccccttcctcccccatgagggagacccaggtctcatgctccaagatgaaggatcgtcctagccaggaaggccaatcgggttctggaagcttcttcctggcacggatcccaggctgaccccacgcctgctcagtgcttcccagaaaacacggggaaccccagggccagggtggccgactagggctactcagacaggagggccactgttaccacacccacccggtgctgggggctttgtaagataagaggcaacactcagggccaggaaggaaacgcaggagccctgaagaggcagcgggagccgccggagcccatggtcagggccagtggtcagccttggggaagctgtgagaggcaggggaggcacgagggggcagcaggcccagagccccggccaagtgccgacctcggagaagctgcctttgctcctgggctccacaaacagcggcttcagcgcctccatcttcctggccaagtcgcgggcctgtgggaggaagaggcagggacacggcagccctggtcacgccgccgatccgatgagggcaagcaggagctgtgaccactgcctgcttcatgctccagccctgccctcacccaccccgcccagaacacaggggagacgcacccgccagaactccaggctcttctccatgacaggataggaagggaagaagatcaggagcccatagggcaccacgcgggcgatgttgcctggaagtgcaggggccggggtcaaggcaggggcaggatgtctgcagggttccctaccagctcttgggagcaggggtccaggatccaggatgggcacagctggggcattcagggcactcacccagagccttccccagggaggataagcactcctcggaaaacctagagccggagaggccactgctcaggacctcaggcctcagtgctcccccacctcccaccccagcagggcccagggacaggccctcaccgtctgtcaaacgcggagctcaactgggctccatcggggcctctggggacgacccccacccagatctggtgcttgtcgatgatgtgtgggttctccaggcagactgggaaagggctgagcgtggccagagggagcagacagtggggaagtgcaccagcacccctttagccctcgaggcccgagacccccagcacccggctcatggggacccccaccacttccaccccgctgatgtcagaggtgtcaccggtgctcaggccctggcaggggtggcccgtacatctgcatctccagagcaaaggaggacaccggggccagcgtgccgctggtaaggatgagggagcggacgccctggcggaccagctcgtgcatgctgtggccgggactgaagcaccagtagctcagcaccttccctgtggggcggggggcggcagagggcacagagtgtgaggacgggactgggggcctgaccacctgcctctctgcccatcaccctctccacccactggcatcaagcaagcgagccgcgggcagccacccaggcccactgtgcagaagtcagaacaaaggaggctgccctgagtgtgagcctgccagcttggggcccctctgggggacagggggtcctgggagtaggaggcagaccccaggcagaggctggggacacctgcagagaggtcagcccactccaaccctaaacttctgcagaaactgtgacatgcggctcagggcaagaagcccaccccgccaagagcacacgggaaggaagcgccggcatcccgacattccacggccgcgtgcagaagacg

SEQ ID NO: 97643 - DNA, 53480 bp, Homo sapiens
gtattttgctgttgaatcattatgattttttaaaaacaaagaccaaacctatgtcataatttgtctcaaatttaggggattcctaggatctatggcttttatctaatcatttgttatgtgccttccatttttatgggtttctgggttctgattgcctacttgcactcatagcagtgcactgactctgccttacctctagttgctggggatcctacttttccttcctgctgtgatgattggctgtgtgtgtcaatttggctaggccatattatcctgttatttaatcagacgctaatctagggtgatgttgtgatattttgtagatatggtaacaactataattaattgactttaaaaaaggaaattgtcttcaataatgtgagagcgcgcctcatccaatcagttgaagtccttacgagcaaaaacaggcttaccagagaaaaaattcactcctaaaacagcagcattagcctgagttgccggcctgcctggtcctacatattttggacattccccactgccacaatcaggtgagcctgggcttcagaattagaaaaattaaaaattagtgaggtattcccccaacttcatgaattccacctataggcctaaccagcgaaagcatcagcattagttgttgagcttaacctcattctttcaatgtaggcaaaagtccaatgaactatccattgtgccacagagcctgctcttaacctggttctgacactccaattgccctttcagatgcttcttcctggtattctccaaaatgtaacttgattctataccagttttgtataccaagtatattagtccgtttccgcagtgctataaagaactacctgagactgggtgatttataaagaaaagagcttcaattgactcacagttccacatggctggggaggcctcaggaaacttacaatcatggtggaaagcaaaggagaagtaagaaccttcttcacgtggtggcgggagaaagaagagaatgtgtgcataggaggtaccgtcaaacacttataaaaccatcagatctcgtgaaaattcactattatgagaacagtatgggggataccacccccagaatccaatcacttccctccctcaacatgtggagactacaattcaagatgagatttgggtggggacacaaagcctaaccatatcaccaacatactactgactcttactctgtatctttactaagtgattccttatgttctacactgccagaatttcacttctctcttccttcatcctcatccctcatcccttttctctttttttaattaaaaaaattgtgggtacatagtgagtatatccctatcccctttcaaccctgaaaaacacacaaaaaaatcctaggtggggaagtcagggggcctctgataaaggcttagcttgtaagtgactgtctgtgttacaaattaagtgattctggacattgaattcttcatttttaagaattatcagagattattagattatctctaagtcactaaattttggatatgataatagggacacatcctagtccttcaggtcctaagatgaataaacctcaaggaatctacctatgtataatacaagtaggtatagtgaagatggttggcattgccaagttgctagccatatttttggctataacaatttctctaactgaactctaaaccccaacctcttttgagtctttcaagttctagaaacttattcctggctggatgcagtggctcacacctgtaatcccagcactttgggaggctgaggcaggaggatcacttatgtcagtttaagacccaccagggcaacatagtgagaccctgtctctacaaaaaatgaaaaataaaaaattatccaggagttatggtgcatgcctgtagtcctagctactcgggaggctgaggtgggagaatatggggaggattgcttgagcccaggagtttggggctgtagtgagctatgatggcaccactgcattccagcatgagcagcagagtaagaccatcatctcaaaaaagaaagaaaaaaagaaagaaagaaacttaacagttcacctgatcaatagacacaagccaaaaccacaccttccatgcaagttagactttggaatagactgcctgtgtcacttaaatctgaacctacactttctaagttaactggaccttgaaagtttgcctattcttttcttctttaactttagaacaatctgtaccttctcttcttttcttcttcaacttcagaacaacctgtaccttcttggttctgaaactttactctgaacattaaaatgttcagagtaatttgtaagtaagttaatggcttagaacgcttgcattctgagaggcagctaccattacatcacccatcaatgtaaaccgtaaacattcctcatgttacagaaggtctcagtgtccacagaattctggcaacaaatgggttgttgttgtctcagaaaagccctaggggcctgccaacatcaacttctttgtctcaggaacctgcccttcctggttccagtgctagatcttgggtgataggtggacaagctagactgggagagcccagagaaactaatcgcactgaggagggtggtagaggtgaggcggatgctaggctcaggtccaacagcaaaaggaagaaggagtccacaaaggaagggagacctcacataataacataatgccagagatagatgggcaggtgactaacttcagggagggccagtcatgaggaaaaagcagaaaaacctacaaggagattgacaagcacacaaagcaatcagaaagctaaccaggtaggcagttggtataggaaggacagaagctaatcctcagcaagtggagatccaacactgaagctgaattgagaactggctgtcttggtgagactgatgtcagcagtgccaaaccaggtctgagaggcaatggtacacaccaggagacaaagcagacacccagcatggaatagagagcccagctctagtcctccaaacaatgactatggcaaagtagaatcaatggtcacagtttgataccgctgtttgccagtacctatgtgtgtgaaaagatattttctgactaaataagtaaaaatctcattactgatcagcacaatgaacatctataatcaatttggagatgagaaacctgatgtgatgactcctgtggtgtagcaattgttttctactgaacgatcagcattcctaaggttgtctctggttcatggaagactgtttctcttactttgtctcaagtacagaaatattccctagtagtgttagatttctaggagccctttcttgttcattttgaaactcagaaatctttggatttccaaacattttccaggttttcataggctcttctcatttttagtgtactcatgagggcctcatttatgactcaaattctagagatgtctccagaagagacattataaaacaaccatgctgcctgggctctccgaggtagagctcagtgtcacagtgctcccacggtgcccatccatgaagcagaaggtacaggccacgtactgtttacatctctgaaacctggcatgaaccaagttatttccccaaacctttaaactcctctctgccgtgtcaactccgtggtggcaggaactaggtcagtttgagcttacagtcttgttctagtgtctagcacagtggccaacacctagaagacattcaatgaacacttgctgaataaattttgtaacggtttcagaaataacattagaagtataagctaccacatacataaatgtccagtgaacccaactgttataaattataataactttactaggtataactttgtaggtgttccaaatctttctctacatccagcattccagaaatagctattacctcagaggaagtcttgtccataaaataaaggcacttcagatgtttttattctacccaaagtaatgaataatgactgagcaccaccaagtaccagactttatgccaggtgttaggaaatgcaggcatgtttaatttctgtatctactctaaagagctttagtctagttgaagaagtagacattttaaaccataatatagtgtaatctgtgcaatactagtagtgctaataaagtgccaggaggaaagaggaagaaatacaaatttttctacagaaagggatttagaaagatatctacgtgagtttgctcagactgctgtgaatagcatactataaactggggtgattcgagtctcagcaaactgaacgctgagaactcaggcttcttgttccttttggctgcaagaaggttggcagccagtcagaactttacccacttgtaagagatcaggcttcttgttccttttggctgcaagaaggttggcagccagtcagaactttacccacttgtaagagattagatgtatcttccttggtgattcagaccagcctaaggggaaagacctgatgataccaactttggggattctccaagaaacaatgtccccagaacacactataaagatgctcaaagttgataagccctgcccagctgctcagagtttccagttggctctttagtcccccactctaaatcctgataggacaaggatggaacaagaagcctgaattctcagctttcagtttgctcagactcaaattaccccccagtttatagtatgctgttcacagcaatctaagcaaactcccctaggtatctttctaaattcctttctgtagaaaaatttgtatttcctccttttctccctggcactttattagcatcactagtattgcacatatcacactctattatggtttaaaatgtctatgtcttcaactaagctaaagctctttagagtagatacatgggccctaacctgactgatgtccttctaggaagagaaaattacgacacagacatgtacaaagggaagaccatgtgaagacacaaggagaagaaggtcatctacaagccaaggacagaggcctctatagaaactaaccctatcaacctcaacctcagacttccagcctccagaattacaagaaaagaaatttctgttgtttaagccacccagtctgtggtattttgttatggcaaccctagcaaacaataccctaagcctaacttttcaagtttttctccagcaggaaatctgaattatttcttttcagcttttagtagctattgtgtggacaacatggttgcatgtgcatattaaagttgttagaaaactaaatttatgccaggtcagacacttgtataacaaaaccatgaatggggagtcatcagctcatcacttagcagctacaaaggagtagttcatgcttagcagtttgtggcatttcacaaccgtcaaagaagtgaaaggcctttggatgtctatgactctcatcaacaattttctttatgaggcaaagaaagctgatcattcaagacataacagatgttttaggggttggtgatgatggtggcatatgaagaaaaacacatactctcaacaatataatagcaaatagaatctagcaatatattaaaaaggataatatattatgaccaagtagcatttataccatagaagcaaaattggtttggcattcaaaagtcaatcaattacatttgcactgaggttatcatagctgagaagacaccgtctctgtggcttcagctcctggctgcaggccgctgatggaggtccagaaggtcagctgctcacagacatcaacttggtgtcggctgcggctccagcattttccgcaggctgcagcttctgggttccaaacttttcatttctcagtctgcaagcgggttagccccgaacaggaagcaactccttctccagccgggaggtggcggcctgcggtcgacgatgcctccggggtccttgggctcaaggttccgtttgggggcgctctcgtccggcttgcgggccgcccttctccacagacggaaccttctggtggcgccgctggtttctgcggggtttgcaaacggcgcgtaccgggcccttcccgtcttccgtacaggttcctgctgttggctgggctcgggagggaacgctccaggtaaagcgctgggggaggaagcgacgccgaggagctacggtttcctccrgaggtctccgcccctctgcccctatattcccagagctcgagtctgatccgggccttgccgggcaccctggaaaggcgggggtgatagtacagatggagacgcaactgcagagcattttcgaagaggtggtggtgagtgcagctgccggccatccaggactacggcttggggacggggagacgcgggggcagccgaccaaggaaactggcctgggcaacctcctctcacgcctccctttttattcccttgttttgacaccgaggttgtatgcggggaagtttagtgattctcaaactgctgtcaagttcattgtatcctttgaaatcgatacagtgacaggccagacaggtattgatagtttcagagctgattaaggtgacttgccctgtgttacattgtaatacttggctaagggaggcgcctttttaaaattaacattgtttacattttgttttttttttttttacagaaaacggaagttatagaagaggcttttcctgggtgagtgtatgcgtggcagagttttgtgtttttatgtgattgtgtctgtcagattttacttrgtttcgtgttggaaggttataagatccactattctgattgtgtgtaattacctttttaaaacgaatgacaaataatgtaatttttatttttttagcatgtttatggatactcctgaagatgagaaaacaaaactaattagctgtttgggggccttcagacagttttggggtggtctttctcaggtgagcgcttcatttttaatacattcagctgatgatttttggcctcttctttttttttttttttttcttttaacatttactttcatgctgctcttaagatcttcctgagaagggagaaataaaattgttatcattttttattctggcttccatttgttttaatttgtatatttcagtggaaaacctgtgttgagaagtcaagttgatactgcacagtgtgagatgtttaaaaaaaaaaacctcccctatgttagattaattgagatcattttcatcctattcggatttatttggtacacttgaaaacagatatgttaagctttacttgtcaaggatacaaattccatttttctgctaaataaaggaattggcacagcattgatacaaagatgctacaataggaataccaagattctataataaggataggaaaatattatagtaaaaatgaggagacaaactgtaaaagtaacaaagaacagctaccagaaaatgtatccgtgaaaaagacaaaaatgtgtcatcctcgaagagctcacattgcagtagtgccttaccttctcatggtacactataggtagggaaatgagaactgtttgcgtgtcagccactggtgataagatttgccactcagacatggatcatataatgccaatacagtcatgttttaacctttttgtttagttgttttctaataggtaatacatttatatggttcaaaatgcacaggtataaaagggtggatccaataactagtctctttctcttctcttacctgttattttttctgtctgtagccaatatcctcaggttatgttttcttctagaagtattttatgcatatagaaacacttttatagcatgatcatataccatgtacactgttcattaattagcactttttttctcctaataataatctacaggtaattccctatcagtccaagcgttacttgttccttcctttcttacttttttttttaaatagcagcataatattccattgtatggctgtaccttcctccttttaaccaatcttctactgtcttctaagtttcttcttactttttctaatttaaccaatgctgtgatgaataatattatgcatgaaaaataggataaattcctagaaatagtattgctgagtcaaaagccttatcagtttgtaatttttatagaaattattaaattttccataagggttatactagtttatgcttccaccagcagtgtttgagattatctttttcttttcttttttttttttttttttggagacagagtctcactctgtcgcccaggctagagtgcagtggcgtgatcttggctcactgcaacctctgcctctcgggttcacgccgttctcctgcctcagcctcccgagtagctgggactacaggcacctgctatcacgcccggctcattttttgtatttttagtagagacggggtttcatcgtgttagccaggttggtctcgatctcccgacctcatgatctgcccacctcggcctcccaaagtgctgggattacaggcatgagccaccgcgcccggctgagagtatctttttcttataacctcacaatagagtgttaagctttttgatctttgccaatcaaaaacatgagaaattttatctcagtataattttattttgcatttctctcagtgatgttgaatatctttccaaaatttaaaaaaaaattcattaaacactttatgaattatgatgtggccctctaatggagagaccaggaagaaaataggtatttccaaatcattgttatatgtgccacaatagaagtatgtatgagaacagtggttgtggagagaagcagaacattataggctctttttggagataatcctagaagacaaactttgatacgggcacaacattttgacatcgtatttaaagttttgccagtctagaaatgtgacatgtcattggattcataatgggctcttgtttgggatcttagggattggattcacacctaattctcctaagcctgatacatactgatccataatgaattttacccccagtgacagtaatatttatatatgccataaagggcactgtttacaatgccttacaacaatctgtgttaagagttttctattgaccgttaatatgttaactaattaattactacttttgaagttcccatgtaataaaaatggtagcattttatctatgtaattacaaaatgttaagcttaatgtgacaaatactaaatctgaattttttaattttgctttttttaaaaattattttcatccacagatgctcatagtgaagtatttctttcatagtattggtatacttccagttgtagtattagctattggttataaaaatgtaactttagaccccaagtaaaatcattctctcattttccaggagtctcatgaacagtgtatccagtggattgttaagtttattcatggtcagcatagtcctaaaagaatttcttttctttatgactgcttagcaatggcagttgagactggtctccttccacccaggtacgtttaatgggtatgagcaatctgaagaattttcttttctrtatgtgattggaaattggttgaggttgttgttgtaaaaaggtaagagaatgaagaagaaggtgaggtttatcaagtaatcctttatataatacctcaggttttagtttctaggagtaatagtctttgaattaggtaatgcttgtgggctcaaaaccagatgtttctgcccaggggctgaaattaatcactttaattagtttgtaaccctttacttttgctgcacaacctyaacaccttatggcttaaaacagtaatactcaggttttaaaattattcatggttttagtggttgactcggcttaggagacactttttactcaaggtcataatgattgtgatcaatgtggctagggctggagcatggcaaaagcttccccactcagatatctggtggttgattcctggctgtcatctggaacctcagctgggattattagccagaacctccgcaggccctcaccttgtggcctagactttctcacctcatggtggagcctaacagcaagtgtgcaaaagagggctaggcagaaattgtatcaccttgtcttcttggaagtcatactgcatccttttggccatagtcttaggtctgcccagatctaaggagtgagaacgtagactttccccctacctctccttgggagaaatgtcagtgtcacatttcagaagaagatgtgggatcaaaaatcttgttgccatcctgttggaaaaatccagtgtaccacaaggtgatagatggtaaacatctaaccgaaagctttagatagacttctttctagtaaaatataacataatgaatattatttcattcttactttgtttttgatctttcatacaagtaaaaaatgtaaaatactacacagatttataagtgtgcttagtaatcacttttatgaaagacacttgtgaggataaatataatacagtgcacagactatggctgtattagtctgtctgatgctgctaacaaagatatacccgagactgggtaacttataaaggaaagaggtttaattgactcacagtttggcatggctagggaggcctcaggaaacttagaataatggcaaaaggcacctcatcacagggtggtgggagagagaatgagtgcccagtgaaggggsaatccccatataaaaccattagatcttgtgagaactaactcactatcatgagaacagtattgggggaactgtccctcatgatttaaatggtttttctcatgacacgtggggattatgggaactacaattcaagatgagatttgtgtgagtacacagccaaaccatattggcggctattagagaacttggaaaattctgtcttgtaactggaatggctatttctttttttataggctggtttgtgaatccctgataaactctgacactcttgagtgggaaagaacacagctttgggccttaacatttaaactggttcggaaaataattgggggagtggattacaaggtatatttttcttattataaaaagtgattgctttcagatatgattgatttttcggtgtgcatgtcttattttcaggtgagagaaatgatgtggaagcatttacaaaatctgtctatttcttgtggtatatttcctgaaaagatttaaagttactcagttgtttccctggctccgctactcccctcccaacattcttataaatacaggtagctgatacatttttatgaagagcagggaagtcacaaagcagaatccgtgttccttcatgctgcaagtattatgatcccttcaaatgaaagcacagagcaggggtgtgtggaactgagaagggatgtaggcatcactgatgaagggagcaagacctggcttcacttctcttgaacgtgggtcttacctcaattaatatcttcagcactttgggctcttgaccaaaaacaacatacactttctagttttgtctcataaaacggcttagggactccatagctacaaaagccattctgcatcttcaggagacttttgttattgtccttttcccgggaattaccagtgtctgaccctgtgctttatttctgcattttctctaatctgaaatgatttaacaggtaatgacctaacagataattattagtttaaatcatgatttatcacacagttaactctaagaagcttttgctaattattttctctttactcagacttatgcaattttcttatttgtatgatacttcataattgttcttttaggtatatgttctgtcttttacaagcttggttacgtagttcatagtcaataaataaatgttgaatgaaatttcttctttatatatcagataatgtaactggtattggatatgtggaaatgattaacagaatagccttggatatccttgagagattaaggtatgtgatggatgagaagggagaataggccagtcacagtggcttacacctataatcccagcacaaaagggagtgagcagaaacagtcctctaccaaaaagtttgatattgttactcaagttttcagagtgcattgaagtcttgttacaatatatttctgtctatatgtataattaaggtttttgacccttgtaacaacgtaaacccttctaatgttatgagggccaaaaaagcttgacaaactgtataatgactttctttgctcattgtattttaagacagtctttagaactctgttttggaacatgactcttctgttgggttaatgttagggacttagattgtaactgattcagaaaatttaaaggtgtgaccttgaaggaatatatcaccctgaaaccttcggacgttttagctaacacagtagacactacttaattttaacccatgtcttttttcttatatcagggtgttcgagatctcttaaaagtgattttggagaagattttgacaattcctaatacagtgagctctgctgttgtacagcagcttctggcagcaagagaggtaatttagacatgtctgaaattcgtgatcataacctcaaaaaagtctagctttgtttaggtctgtgcttttaatacttacggtattttgtgagatgctctatttcttctaccaaaaaaaaatcacttctattttaaaagatgctagttcccttatatttcaaaaggacattttaaattttaattcatggttttaaattatgaaaacaatgaaatagaaattaaaatagcttaaacattacaagaccttagcatatggaccacttaaaagatctttgtactttgtaactagtatcgcaagaattgttacgttggtctgttgcactcctgtttaagtgtgccaatatttaaagcatgtgcaaggttatttactaaccatgaacaatccattccattgtttattaatctttatttttagatattttttacatataaatgtattctttgctacagttgaaacccaataaatccattaaataatatctctatattttattttaattgacaagtagcaattgtctgtgtgtgtgtatatatattatatatacttatttttttataatgataacacttaaaatctactctcttagcaattttgaagtatacactatatcgttattaaccatagtcaccataatgtccagtaggtctcttgaacttattcctcttgtcaaagtgaaattttgtcctttgaccaacatctctccagaaagtaacatctctactttttaatgtcttttttgttgtcattgtcattgtagtgtttaaaacgctcacatgggccagatgcagtggcgcatgtctgtaatcccagtgctttgggaggccaaggcgggaggctcatttaagcccattgttagagaccagccaggacatcctggggagaccctgtctttacaaaaaattaaaaagttagccgggcctgctggcatacacctatagtcccagctactctggaggctgaggtgggaacaccactggagccccagaggttgaagatgtagtgagccatgattacgccactgcactccaagcctgggcaacagagcaagaccctgtctcaaaaaaaaaaaaaaataatgataataaataaaataaagggcttatatgtgggactagtcaagaatgatgtggcctttttgtttttcttaggttatagcatatatcttggaaagaaatgcctgcttattaccagcctattttgcagtcactgagatcaggaaactgtatcctgaaggcaaacttccacactgggtaaattttatatttcctgaatttttaataaaaattttcggctgggcttcgtggctcacagcactttgggaggcaaaggtgggaagatgatttgaggacaagagttcaagacccaacctgggtaacataacaagactctgtctctgcaaaacattaaaaaacacacgcacacatattagccaggcatagtagcacatgcctatagccccagctactcaggagctgaggtgggaggattacttgaaaccaggagtttgaggctgcagtgagctgtgatcacaccactgtactctagcttcggcaaaaggacgagaccctgtctcacacacaaaaaagggtattttataaaaaacagttatattaatcttatttttgtgtgcttatttttttaatgatgacttttatccttagataatatgtatatttttaatcatgatgtatttctttcatttccatttccattgagaatttatatgccatgtaataaaatatgatcagcttcatcaaatagctaaggatatggtggtgtgacttggtttaattaagggacagatgaactggcgagtgattttttagaaggaagcaaaagggagctaacctttaaacagttatcatgtgcaatctttacatatattatctcattttatataaatgttcatatatttcaggggcagtctcaattttccttttgtacgtatttatttgacttccctctttctttctctctttagttacttggaaacctagtatcagactttgtggataccttcaggcccacagcaaggataaactccatttgtggtaggattataattttamatatgccaaatagtacctgatttttagtaatctaattattgaacaaagctgarggatgktctcttaatatgtgccttggtggcttgtcattttggtgactctctaagagcttaatataatgcctttcccttgttttcacttactctgtgtgccaagtacagggaggaaaaagaaactctctggaatgggtttaagcttcatttaaaaccattctagaagtgggtttcttggtgattagaaagacattttaatacagctagtaaagcaccatggaatttctaggcagctggaagtctgaacagacctgtccctctgtggctacagaacgtgaaagtgtcaggctcactcagcccattctaattcccacttttgcttttcctttcgcattttcccatgttttgttagagtctctgaactttcttttaaaaataaccatgtgatttggcaatttttgcagtgcccacatatcctctttaattatttctagaaatcatggtgacctcaactgtgtggaaatatagaccattgtttattcagtgatcaaatattgagtacttcctataagccaggtgctattctagatactgaaaatacaaatacaatctaaatagacactagacagataattatcaggtttctagcttttgtaactgagtggatattgatatcatgtagtgaattatggaagcaaagtaggttggagaaggatgatgaatttgagacatgttaagcttgaggtgcttgtaggacatccaagtgacgatatttgttaggcagttggatgtatgagctgatagtcatatgtgacatctaaggcctctaggaatatcgtgcataaagtttaatcatgttgacactggactagtggtcttaaactttttcctgtaaagggccatgtagtaaatattttaagcttcgtaggctacagaatctgttgcagctactcagctctgccattggactgcaaaagcagtkgtgttccaataaaactttacaaaaacaggtgccaggctggatttggcccatggattatagttggctgatctctgccctagacatttagacaaaatgcgatattttcaactttggaaagcctgtgcaaattgatcttcaactatctgaactaaaaataaaattcccaaccttcagtctcaytgaaacatttttrtaagccatttttaaaccaaaccaatgcctatttcagcatatatgttcattaaatatttgtgaagtgaatgaagtactgctgtgttcacatttacttaaaaacatttttgtaatacatacaggtcgctgtagtcttctgccagttgtaaataattcgggtgccatttgtaattcatggaaactggatcctgctactcttcgttttcctttgaaaggccttttgccatatgataaggtatgttgctaaatataatggcacttttagtccatctgacagtcttcaacctagattataagatatgtgatgctaaattgttgcttcataatctgaagaagtaartatttaatgaaagatagtttatagtttatcatgttattctagtatctaaatataccytgtggtttatgctattgtgggtgtttatgctccagtggtccacctctggcaaagtatttggaggtgagaaactgaaattttaaatggcaaactgaaattttaaattgattccttgattaagtcctcacattttaaaagtagtagagctttttaaatgtgaactcagtctaattccagaatctacactcttaacacctgtgctatcaagttatttgtctttccaaatttggaaatagtgtttttgtttacacttgtaaaacagaatttagaaactgtctccattcttcttagattacatttccgagcagaaaattacttccttacaatgatacttaagactaatgtgactatatctgaagtcacatttctgagtttaaccctaaagggacgagggtatgctttttcaaatcactgaaattttgatataccctttaaggggcaccagtccctctaaattgttgcattagtgagcagtcttgctgactgaactgataattttttgggcctagttgctctttttacaactatatctacattgtcaactcttgctataagaatgtctttgtaaaacagtcactttggttattctgtttttaaatgcctcaggaattctttaaaattagcacattgaagtgaatgcttatgtactcagacccctttcccagacattttactgttaaaatgaagaaaggaacagtaaacaaagacattctggtagatggggtgaatagagagggattacaggctgatgggaatgaatttaaaagaaaaaaaaaaaaagaaatttaatgccgtaactgtttctaaggtttttacatcatagttacaatagcatagtcttttaaagattatcttaaaaatcggtatatgaagtgtttttttttttctatctatccgtccatccacctaaggggacatttaaaaaaatccagctaacattatgcaaatagtacttgaggttgataagaagaaaaactttcattgactctatcaaaatgctatgtccccagcgacacagatagaaatgaaaacgatgtgctctagaaagccgtaagatgacttagaaaccatctagcatcatggaagagttagaataaactaaaatgaaatccttctaaattaatatatttaataaatataaattaaatataaattaatatttttaaattaatatattttaagtatgggcaggcaaaattaacaaatataactaggcttatcactgtttcatctacttctcaaaaagttgatatgctttaagctaaaaagctgttttttgaatcttactaggaaaatagggaattgattggtctatattcaagacattgaataaatattcagcctgtcatttggaaaactctgaaaaagattttgtttttaatgtcactttctagcattattttttgtttgattgtttgtttcttaagtcaggctctcactctgtcacccaggctggagtatagtggcacaatcacagctcaccgcaccctcaacctttggggctcaggtgaccctccccacctcagcctcctgagtagccgagactacaggcatatgccaccatgcccggctagttttttgtgttttttgtagagatggggttttgccatattgcccaggctggcctcaaactcatgggctcaagagatcttcccatcttggcctcccaaagtgctgggattacaggcatgagccactatgcctggcctagtactatttattataaactgaatttggctatcagaaattctatacttacatgcctagaaagacttctagaaaattgacttgttaagttttaacagaaaggaagcaaagatattattaatgatgcttctttatgtctaggaaacatgagcacctaggacaaaatctatataaattgacattagtgagatgctaaaatttaaaaaatttaaaccttctgcgttttcagggaaaggatagtagaaagtgcactggggaagggggattggaaggtctggtgctagtgttatctttattgttaccctctgtatgaccttggggcaagccacttcatctcaggtgtcaaatgaggcaaatgaggggtgggaacagatgaactgtaagcactaaaatcctatgatttttttcccactagatactgcctactctgtgaaggtaacaagtgcctttagaggattttttaatctcatttctaataatttggattaatgttgacattgatcttgaagcaatgattttcttattttctttaaaggatctgtttgaaccacagactgctttgttgagatatgtattggagcagccttattccagggatatggtctgcaatatgctaggtttaaataagcaggtactgtactatgctggaaacctagtaaattctgcatagaatctgcactattcttttctcttttctttgctatagctaactgagcaaaacagttaagaactatttagtgacttttaaaaatatacatggttttttaaacaatgtattattcctatcatttatatattgctttaagaatgtttaaatttaaaaagaaaaatttttaaagttggtttattttgcattgcttttttttctataaggccagtttcaagtataccttttgccagagaaacctacacatgactcaaccataatttttgactttttttgttgtttgggtgtctatttttatataacccttggtatcttcagcgtggccttcttgctgattttttttttttttttttttttttttttttttggtgtgtgtttgcttgtttttggtggtttaacatgtgggagggtttgtgctgactctgggttccttgaggctggcctcatagtcactgttttgtcttttctttttttcttcctttatttttgttctgtcctgtcttgtcctgcccatcctccaatgctctagaccttgaacattgctcaggtatgttcacaaccttactgttgtattgtgactaacgatacgctggccgctttgtagccactgattccatttagagaatacgtgtatggtcggggcttgaaattggcaggaccatgctgagaccaaggccactaaaaaacgatttcttcttgggatatgagagttatttttggtggattgtttttgtttttgtttttttggtgtttgttattttaatattcttttttctttttttttcttttttttttttttttttggtaacaaagagacaacacctggcactcaatgaagcctgtcactttttgatggtttatttttccttcccactccatttactttttcctactttagggctaaagctagcctggtggaattttcagagatggaaagatttgtggtggcctttatctttccagactactaaaacaaataaagaaaaataacaacaacaaaaatacttatgttgctttgccttaaaacaaaaacaaattaaaaacaacacaaaaaagagaaaaaaggcactttaatagagatatgctgcttttaaaagttggagtggtaaactttatacaggaaaggcttttttggaaacatggggattgactaagaaatgtcagactcttaggtgaccccacacctgcttgacaaacacccttctttgtcagtctttgccagaagtgccttcctcctagagtgagctcctctcaactggagctcacctgtggtgggagaaaaacactatggccaaactttataaatcaaactcttaacagtcccaagtctgttccaggacttttcacctttgatattttaaacaaaatagtggttccaattatttttgttaaaaatttttgagcccaacatattaaaatagaccagctttttgattttaaaaagacgttcttgtctaggttatataaaatagcgttactgtttgcaatactatagtgaaggttgtgccagtgcttccatttataaagccctatttttaaggacatatagcttggccataaaacttgctcagtgttgaaactttgcatgccaaacctcaccctartagcagtatctcttttattattttaagttttttcttctgaaaaatttgccaagtttccttgtttggacaagcttttgtacatgtgaaactgaaactgcttcacactagagtatctgacaggtacctcatataatctgtcaatttaacatcttaaataccaagtcattaattctgatcaactttcattgaattagaggtaagtattcagttaactttgaaagaatgcttcatgctatgttttaaaactaatttttacagtgaaccttaagtcatactggactcaatttttttacagtttggtggataaatgtacccatggtcatttgagctgcaaataccctcccccagatatccttagctatcctaagcttttttctcttgggggcgggcagctcttctcaaactagaaattgacaaaacaattgagagtatttctgatctgatcatttcggtaacaagtttcaacctaaaaaaagtttatgactaagacataaatccataaaaaataaagtttataatggaaatgctgacagaacattattagtattggtaccactgtagtgtaaacattgtcaaaaattcacaattcatcagtaatcgttttcatagaaaacttttagttaggggatgtgtagacagaagataatatgctcagttgacttgatatttttacctactggaaagtagactagaaaacgagaacacacagtataagaagcatatgattaaagataaccaagtcatcttatcacatcttttatcattacagaactacatcctacactatactttcttgtcctttctctagcaatgtgataatttactcacagcttttgaaaccttaagagctgttcatattacattttccagtaggaattgagttatattttatgctaatattggttacattcagcaagtcataaatagcccagtttcatgacctgcaaggtggagcgttagacttcaactcacaatggaaaaatcttttttatgtgcttacacgagagtttgtattctttctgctgaataaaagcactacaaaacagatacactcctcaagctcttacatagtgtggtgtgtgaaccctggctactatgagacagtgaagtattcatcattcatttgatcttatgttaatcagtaagtttctctttgaaattattctgattatgggtaactttcttggttaaagcagagaatatgattttgaaagagaaaatgacattgaaaagaatttttcttcccaacttctcctgaatagatattattttaaaatttatttacatcactgaaataatttaaaattaagctcacctaagtacagtatgttaaaatttcactgcaaaagcattatgagaactgtacatgaaaagcgtcaagtaccactcaatataggatatgagatgctaagactgaaaagcgacatcatttgccatttgaaatagtgctgggaaggaattgggcataggtcgagggttaatattaatgtttctattaatgtcttttgcctgatttttagcttttatcaaagctgaaaatattaaatgaagtttcagtatagtttgggctactaggtagaaatagaattgttaaaatattgaatgtaaatattcttaaaacaggttttaactaaataggcatatagttatgatgtacactaacaaatttaactatatatgtcagtattttgaagacttaaattcaccaaagctttcacaaaacaagatgtgaacagtcatagggatagcatccattggcttatgaaataatcttagcctagtgattgacagttaacttttattcatagattctgaaactgctttacaaatgtttgttccactttgtaaaaccatctgctatgtagtagagagtcttaattttaatgtacctgtctttaaataattgaaaactaaagcagtttattattctgaagtagcaacacagatcattttgtatctcagacttttctttttttttttttgatgttaccaaaatttgcagataaagcaacatatttaagctgtctttaaacttgatttgagaaatatccttggttttaaccaaaaacacctgggaaatttgtagttaatcctgatagctcttctgctaccatcaggtaccggagcattaggtactgtagatattcctgacttaatttttgacagaaaagttaagggtaatcttgagtcatggcatatattgaaagaccatcagctttaactgtaaatttcctagttgttcttgctttgtcaaaatcgtactatttttgctttccttttaaaatcattaactgtatgataatcactacatgcctaaaaatatgtaggtgaaaatccagtttttttcttaaatagctaatactaaaaaaggaaactccaaagtgactcaagtgctaaaaactagttttatttagtttgctcttttttcctaaagcagattgatggaagaccattatggatggagaaatagatgacaaattggtcagtttccaaactggaagcaaattcccatcactagtgaaaaattcctactggaaatcctggctttacttcttttcacaattttttctgactctgtatactttgaatgatctcactctaaatttgtgttgtctgacacatttcttaggttgttggtggttggcagaactagtgaatttcaagccctgtacacagtagttttgcatgctgatttaagaaatagtctgtagtgttgtctgttgcactttgctctgcttcataatgataattacatttggaggaaaagtactgtagtctcaactggtggtgttaatattgctatttgtaaacctgtaatgtgattgaactgtggtcatggcattgtgtttttggaaaaaatatgaaacaaccattgatgcttatcatttggatagatgtttgttttatttgcatgctttaagaaactacagctatattggagcttacaagtttggagctggcaaagagcatgcaaaagaggggatgctattcattatgtcttgtttatttccaaatttgtccccattttgcatttttttccctaaatttgaaaaaatcatatccctttttcatggcaaaagactgataatcacatctaaagtttagggggaaagatctgtattagtaattgtattcactagaagggcttccaactgcctgctactaagtcatataacatatttataaaggaaatatgaaaatggcttaaacatggcttaacatatttcttttggtaaaaatatattttttaaatcacttttaaaagcacagatctttttgcctctagaaagggaagttgcattctcatttttagtgtttaaactcaattctttttcttgttttagattttaaagtggtctaatttaaaattaaagctgcattatgtttggcttccaagaaggaagagcagagagatcaattttttttcctcttgtggaagaagtttccatttcagtatcaggacgaataccacacattgaaaacagatgttgaataatctggtagctatttagatatacctctgtatataaagttagtgtaaacttataggggttactttaaaataaagagattcacataactgctttatttgttctgtcacaatgtttgatgcctgtaaatccagggttttcatcttttgacttagattgcaaaattaatactgctatccctgtttcatatgccctttaaaatgttatctttttccaaaggataaataacaaaattctctactatgcattgccctttgtcaaattgaaacaatgatgtccatagtggaagtcaaaagttaatgggaagtckgttttgtaggaaacctgaaaacattttttcatgaagcttatyctgtataataatataacatgatgcagctttaatagactaaatctaaccttgacttcttaagttcaacttcattccgtgcttctcagcctcttgttacaattaatgcccattaactggtaacttctgaaactaaccgagaggcttttggaatactgtatttaatctctgccctacagcacaagcagcgctgccctgtgctggaggaccagttggtggatctggttgtttatgccatggagcgatctgagaccgaggagaagtttgacgatgggggaacaagccaactcctgtggcagcatctctcaagtcagctcattttctttgtgcttttccagtttgcaagttttccacatatggtgctttctcttcatcagaaggtatgtactaaatcttatggtcggagtgacttcacctgttgattactgtattttagactgctgtgggcattccctagtgattttagaactgacrgaagttctgagccctaatttctgtcctgtttagtgcttttatagtttcttaactttttactttcttgtcactgtaaaaacaggattcagtcattcattctatgtattctcagtgcaggcaccagcagatacaagatgaaaaggcactgtaatatcctcaaggagcacctcactagaggaggggatactttatatatatatatatacatatatatatatgtatgtgtatatatatatagagtacatatatatatgtatgtatatacatacacacacacacaacatgattatatcttaatagttgttataatgaaagcacatttccctgcaatacaaataaaaggtaatagtccctaaggttgcagtgagccaaaatcacacgactgcactccagcctcggcgacagagcgagactctgtgtcaaaaaaaaaaaaaaaaaaaaaaagggaatagtctctatcagaaatatcagggatggctgtatcaaagagatctttaagctaacacttgaaggacaaatagaaacttgctgagagaaaaagaaaagtgtttcctagcaataaaaccatcatttagaaagggatagagatgtgtgagaactggaaataaaaatataaaggggaaatcgttgatgagataaggaaggcaggaaagcaagagcagacatggagaactttgaatggccatgtgcctgttctaaggagtttagattttgttttggaggcaatgcagaggagaatggcatcatcatatgcaagttggaaaaatgctaatgtccacatggagaaagaaggtggtgtagcgatggacaggtacaaagccagaagcaaggaaattagtgagagatactacagtggactaggtgaaagatgctgaaggcctaaaccaggacagaaaggaggagccagagatcaggtacactgacgtggaataggactaggtgactgacagcgaatacagagagtagcgggagtctaggcttgctgagtggttcctactgtgggaatgaatagaagggaggacgatgaatccaaaaaagggagacaagtggaagacttaagtttgtgggaaaagacattttttgtcaaaaattttagacatattgaatgggaataaaagttgttttacataacatctccacagcatgaattatcttggggaaaatttttcataaatattgttaaaatcctttcaaccaccttctcccagaaaccaccattagtttctgttataatgtacagaaaaccagccgggtggggtggctcactcctgtaatcccagcactttgggaggccgaagccggtggattgcttgagttcaggagttcgagaccagcctgggmaacatggcaagaccccatctctatccttgttctaaaaagatacatataaataaacaagaaacaaagtgtacagaaaatgaggaagcatgttttatgacaaccagtccatgacaatttcaaattaaaaaaaaaaaatccttttggtgtgatagagtattccccaggttttgatgagatttttaaaataagaattatcccatattaaacttgattctcatgcacacatgatcaacttaaagaggtggtgttgtgcatgttgtatatgactatgttctaaaacattgcatttttatatgcattagttgttttggggagcaggaaataagcatatatataatattaaaataatttagcaggttttgcatggtgtgtcttgaattgagactaagtaattactaagtgccaaagttagatgctgactttctcagagcaagaaccaggtttctccttaaaaacaaaaacaaaaaaacaacaaaaacttcctgtattcatctctttaagtagcagtgtatacatgtgtatttaaacatcttttatagttagcagggcgaggactgattaaaggcagagatcatcttatgtgggttctcctgcaattcatttctggaagtattcagaaaaatgcactagctgattttctccctgtgatgaagctcttcgacttgctatacccagaaaaagaagtaagctttactgagtaactattcataacaacatgatgagtaaattatgtctaatttatgtttaaggattttagtgtgattttgtgtatttctaaagtttatgctaaatcacaattgaatgttaagtgtagcaagctctttctctacattctaggtaggtctacagttttacaaatcactaaagctgttttaatctatatacatcattgaatggccagataacagtctttattaatagctattttttctttgacagttgagcctcagtatgtcccctgggtattttatcatataagatatttgagtaaaatgtgatgtattttgatgattgccattttctagaagtactttatcatgaattgttgttgttgttgttgttgttgttaaggagtttcactgttgtcacccaggctggagtgcagtggcgtgatctcagctcactgcaacctccacctcctgggttgaagcaattctcctgcctcagcctcccgagtagctgagattacatgcacatgccaacatgcccgactaatttttgtatttttggtagagacagggtttcgccgtgttggccaggctggtcttgaactcctgaccttaggtgatctgcccagaaaattttaagatgaaacaagagtatttcttgatgatgggtataacatgatggggttactgtaaccccaccatgcactagctgtaaccccaccatgcactagctgtaaccccaccatgttatacccatcatcaagaaatactcttgtttcatctttcctccttattttttttgttaatgttggacaattttcaagcaaatcccagacatccatatcattttacccattaatagtcaatatgtttaaatgtaattatttaggttgcgtatttcttagatttttatctgttcttaaaaattattatgagacttttagaaagtcttgtttttagttacatttgtcactttagtaagatttcatgatgatgtgttttaattttttaaaagtaaaaattaaaaatttatttttatttgagaatgctctgcgatagtaggaaaagcttgacmaagcacctgtgaatatgtgttacttaaagcaagtaaaaacatataccaaataaagcatcttgtaataatttcaaaattttatggctgttagaccttctgatttgtattattgaattatcggggctaaagtaagacatgatatgctaaaaagagttatattagaaattgattactaaaatacacataattatttaattcttctctttcttctattgtgttatttttcaaattgttatttttcagtatatcccagttcctgatattaacaaaccccagtcaacccatgcctttgcaatgacctgtatttggattcatctcaatagaaaagctcaaaatgacaactccaagctacagattccaatacctcattccctaagacttcaccatgagtaagttatttgttgcttgatacttaattttcttgtttaattaatagcggattgtagactaatattggtctcggtgtttgtgtgaaatttggaaatctccgcatacccactataggtaagggcaaatacttgatgtatatgtcatagcaggagaatctgaccagtacctatatcaggaaacagctacaaggttagtcttgcttatatgtatagatttttttttttaatttttaaggctgatcttcagttgtatatgttatactttaaagttattaatataatgaaagcatatcaatttttataaatgtaaaaatgtttcagaatttcccaagtgcttggaacttcagcataagctgactgagatatcattcatctctgggctgccaggattgattgagctgatctggctggcatgccccttaatatctcttccaaagttgtgatgactcaatgaagataccattcttagatagtattgtattgtagtcaagggtgctaggagtagcctaacttcccacctagaacttctgagaaggactgccacttctcttcacaggagatggcaggattgtcagacttgatacttcatttggttttcattttatgagacascccttaaccaccttttcatagtggtatctgtaatgaagacattgttgtgtttatacagacagataataaatagaaacctggttcatagacttgtgagttatttcttcattctctgaaacttagcctaatatggtggtcatatatgtagtgcatacttaacagtacccattaattgtttatttaaaattatttttcttctgaaatgctactcaaacttctatgtgtattcccactgtacatttcacacagaaactataatacctataggaacaaagatagcattaataaataattrcataaaattgaacttttaaaaaaatacaaattaacattatggaagttattttcattttttctttttaatggaacgtgaatatttaggttcctgcagcagagtctaagaaataaaagtttacagatgaatgactataagattgctctattgtgtaatgcatactctacaaattcagaatgttttacattacccatgggagctctggtagaaactatttatggaaatggaattatgaggatacctctccctggaacaaactgtatggcttcaggatctattacccccttacctatgaacctcctggattcactgacagttcatgccaaaatgaggtatgttctttttattaatttggttccatgtcagggaattgatacragtatagtataaacctttatttcatgattttatgtgcgtattatttcayagtcaggtacatttgagaaaaaaaagttagctttattttattacaaaagtaaatattttttattataggaattctaggataaacaaacccaaagaaagtaattgwtgtaatctctacatgagagataagcattataaaaattttttgcacattttttttcattttttatagatagttaagaatgaggactagtgtagctagagcttccaacatttttggaaagggctagaaatccagattttttattagtagtctttcagcttttaagtattggctcaaatttgaaacaaccactgtataggccaaagagaatttgtctgtgggcctccaagtggagcatcagtcctggtagagctatgctctttttcaaatggtaaccattgtgatagaattacacatgtgcttcacttgcatatataacagatttgagcaaagccccattagaacgtaacatttgggtcttagcagtgatttattaaagtaaatctgtgacaaaagttatttaatttcccaaatgtattttgatgcatcatttgagtgaccaaaatccctcaagcatgctcttatgagttgaatccaaagtttgtttttccatgagcagggggatccgtatgcatattgaaagcgccacagaaacggaatgagtctcagattgtgcagtgcatccttaccaagtgtcctgcacagcttaaacacattaaatgaatcaacttcatttgaatcatttaagttcagatttatactaagttacttctaagtagagtagcccctatgtttatgtcaaaaatatggatttttattttcttccctttttttctcctcagccttattcacagcattgcaaccagggtgataaaacttgctcatgcaaagtccagtgtggccttggctccagccctagtggaaacttacagtcgtttattggtctatatggaaatagagtctttgggcatcaaaggatttatcagtaagacaggactttctggtgtttataactattaacccattcattaactctaaagttacttttctaggtcctggggacacagcagagaacaagtcaccaccatgatggagcttatggaggaggacattaaataaatgaaatatacaatatgtcagatgatacatgttatagagaaaaataaagcaaaaaggaataggaagtgtgagggttggggggtttgttgcatttttaagtaaagtggtaagaaaaggttaatgtgctaggtgcctgggatgcagtgagcaggatagacctggtccctgtcctcatgcaaatggattctgcctgaggcagcaatgctgtcctccagtgcatacgaagtctgactggaaataaagaaggaattttcctaccttgcagaagatacattataatgtctcatttattatatagttctaaaataatagatactttctgatatagaagtgtttttctgattcatggtaattccagcttttcacgaatacagcatagtcttaattttaaccacaataactcttcttagataactgattgttgaacaaaactttcttgggggtaggaggaaacaagggcaggtataatacaattttttgtattaaaaagtgaayctcatacttcaaaaggtatggaacattaattgtctaaaaataaaagatatcagaattgagaagattaatgttttttcatatcttgtctcattttatttttccagataaacatgattatcaattgccaaatcccaggaaaaaagcaaacttgatattatagttaggatctgaatttttccttactgttaaagtagaaaataagaaaatatggagaatatatatgtgtgtgggcgtgtgtattttcacaatcaaatctttatattttactcaatgtgactttcttcaaatatcttttcatgcatagcctttaataattggtaccttaaattgtctttttcctccaggtcagcttttgccaactgttttcaaatcacatgcatgggggatcttacacacactccttgagatgtttagctaccggatgcatcatattcagcctcattacagagttcagctcctgagtcatcttcatactttggctgcagttgcacaaacaaaccagaaccagctccatctttggtgagctcattgaagaccatctttccttaagatttattagaaactttcttggagatgaggttcttaatcctttacctttaccttatagtttttttttttattattattcatctgtcataaaacttctctgcttctaaagtattttgtttccagtataggagcagagtccagctttttaaatagaaactgattaagatagttgagtccttccttcaggatctttggactgagaattagtacttccagggtatttattattatgttgtaacttagccctttagaatgctggttttaagtatacttcagattatggttaaagtatcatgtcacattgattttgctttacattaaaatatattttagatagaaaaatataatttttgaaatgcagtatctccaggtgaaattttttagtcctataggcgacaagccatctttttcaaatgtgtaaaaagtcacgattttcactataaaattggacacattaggttttttaaacaaattaagcaacatttattctcacacaaaagtgtttttttaaagaagggatagtcatagattgcatgtttttccattgtaattaaccttagatttaattccataattctgaaatttttttacatttctttttattctcccaattttcagtgtcgagagcactgctctcaggcttataacagcattaggtagctcagaggtacaaccgcagtttacacgcttccttagtgatcccaaaacagtgctctcagcagaatctgaagaactgaaccgagccttgatattgaccttggctagagcaactcatgtaacaggtacggtgaatatgtgactacaaacaacaacagatgaattaaagtgtgccatgattctactaattactatagttrtaacatactaaaaagatacttttcatttgtttgaaaaaagcctgttgttttgatatcttcactatttcactcatttatggaagctcttttgtgtaccatcattctattaataactgcgttgagcatcgttttcagctatccataattttaaagtagtaatactttaagctttttggtctcaggactgctttacactcttaaaaacaaaattgaaattcccaaagagtttctgtttatatggattatatctatggatatttattatattagatattaaaattaagaagtttaaaaatatttattaatttgtttttaaatagcaataataaacattacatgttaatatatgatgttataaaaaaagtatattttctaaagcaaaactttagtgagaagaggtgccattgtttgacatttttgcttctctaatatctggtgtaaaggaagacatagtttggattctcatctgcttagacatttaatccattgaagttttagttgaagtaagtgaaaaatgtggcctcacacagatgaggttggaaagagaggagtattttaatagctttttcagataattgggaatgttctttgacatcacatggaaaaatgatagttgcttaaaggttagctgcaatatggaatccaaaacccccagtaaacttcatgtactttgttacattataatctgtacatctgttttatacatttagtggatttttaaatccatgcatgttttgtaacttcatgaattattcattttgaaaatactggttcactgagttacgtagatctagcaaacgttgacattttgtttatacagtatcagaaaattacatttgttaatatcactgcaaagtttattagaaaaatctaagttttggaatgctatcatgtcgtggtagatacaggttttccaaaatttcaatttttacttgaaaggtcaaattttatcattggaaaaagttactatcatttgttttccttaaagtgacaagctcattttgttaattttcaagaaaatgtctgctaaatacgtaagtctagctagctatagttttctgtcagacgttctttcaagtaaaattggaattcaaaaaaaaaaaagcagctgatttaactcagtgctcagtcagtcacacaagtgcacaagtgtttttcctcaagacacccatcaaacttggaacactaggcatatgcttccccttttgttacatatgatgttaaaaataggtgtcgagattgacactggcacttttctttcactgagtgcatgtgctggagaatacaaagccttttcatctagtctggcaccactgtttgatttgtgcttaggaccagcagttttaccaccattgcttttgtaccgtcagtgctcataccaagtgaaaaagcctgatatctttttattattatttgacctcattgaatctttgaagggctattggggaatccccaagaggtctacagacyacacttgagaactgatgttttaaagagatagttattggttttagcaacctcaaatacgtttatgtaaattattttgttttacataaagaaccctcttcaattctgagatttatacatgcattatgtaattatttcactcaccaaaaaagatatctttctttattctgttcccttggccgaataaagtactactaaatcagtgtcaaagtaaatgaacagtagtgatgggcttgtattactgttatcgctggtactctgtaacctcaaaaaaagagatttcaaatgtcttttgtcatcttttcataaactgttctcatattttctaatgtgatcatccagatcattcataaactaagcaaatttaggttctaagctgaatataactagttaagcagtgaatgcactgcagtgaaattctcagtgtacataattattattttcgctataatcttttatgaattgtggatataatcatttatatctggattacatctatttgtttatgtttagatttttttacaggctctgattcaattcagggaacttggtgtaaagacatacttcagaccatcatgagtttcactcctcataattgggcttcacacaccctgagctgttttccaggcccactacaggtaatttggtcttgaattacttattgaatgcacatgaaatccttcttcccattcacaatggtgttctagagtgagtcttggtgacttctgaataaaattagcttttatttattttaaaaaatatttaggggctgggcatggtggcacaagcctctagtcttaactgcttgagaggctgaggcaagggggatggcttgagcccaggaattcaggttcacaaggaactatggtcacaccactgtaccacagcctgggtgacagagccagaccctgtctgtagaaaaaaaaaaaaaagtcattacttacaaaatctctcaagttgttctgtgtcctactctggtactggacatgtttctaaaaatttaattattatggtttcatcttagttaacagttttaaggggaggaagagtagaaagaggaaaaaaataaaagtgaaaaaaattgaaaaagagaaaaaaatagttaatggttttagaatctcatgaaaattaacatagtacctgaaaacttttttctctctcatagaactgaaatggggagaagtataacgtaatggagcttcacagagtgtgcgtaatatgacacttcactgaatttttttcttaatcacagaaaaactgtaaacctggcttttctaataaggagaaaggcaaacctcatctgtcttctccttttcagaaaaaatgttaggcatgatgaacatccatttttcataactcctggtagggctagagcatttggtttttaaacttaccaaatcacctggagggcttgctaagctgcagttggctgggcccccagccacagagcttctgattcagtaaatctgggataaggtctgagaattttgcatttcttgtaagacccagatgatgctgataccgctggtgttgggaccacactctgagaatcactgggctagtgcaatggattttcctcaaagacactaacatatgtagccaaagggtagagacacttcattcttttttttctttttaagattggcggaagtatcaacagatgattgaagaagctttgaattcaggcttacttagaatttccatttaggaaatctaggaaaaggaatcttggagataatctagtcaagcttatgtattttccagacacagaaattcaggccttaattgctgagttgctcaaggtgacctagagtttattartgtcagaatcaagtctagaactggtttattaactccatatccagtgctctttctactataaccaatgaaataaacttctaatcctctttttaggcattcttcaaacaaaataatgtgcctcaggaaagccgttttaatctgaaaaaaaatgtggaggaggagtataggaagtggaagtcaatgagcaacgaaaacgacattattacccacttctctatgcagggctcccctcctctctttctttgtcttctctggaaaatgctcttggaaacagatcatattaatcagattggctataggtaagtcaaaaacctaatttgcattccatttggcaarttgttgtatccatacaacaatggagtttatgttttactctctgccttccagagtattagagagaattggagccagggccttggtagcccatgtgaggacatttgcagatttcctggtatatgagttttctacatcagcagggggtcagcaactcaataaatgcattgaaattcttaatgacatggtatggaagtataacattgttacactggacagattaattctctgcctggtaagaataaatacatttctaagcttattctcttagatcaagatgtatgactaatatatgttatgccaatctgctctatattgctttgaaggatttaatgaatttatactatatcaagcattgctgtcacttccctaaagagccggaaattttccaatttctgtttttgtttgtttttgtttttttgtttgttttttgagacagggtctcgctctgtcgcccagtgcagtggcgtgatcatggctcactgcagcctcaacctcctggtctcaagcaatctcctcctgcctcagcctcctgagtagctgggagtacaggcatatgctaccatacccagctagttttttttctttttaacttttttatagagatggggtttctccatgttgcccaggctggtctcgaactcctgggctgaagcaatcctccctcttcagcttcccaaagtgctgggattacaggcgtgagctactgcttccagccccaatttccttattcattcatttaataagtacatattgaatatcaactgtgttctatgtatagaaggtacagaagtaaataaaatagatgtggtcctagccttgwgatactttgaaaatatgagcaattagaccctgagttgattctccaaaactcccactagagggaggaagtagcagtaagtcactgtgtttctttacagagtgcgaatataaccatttctgtacactttggtaacaaacattccccaaatgtttttttcttctcctgactttgatgtctatttccagcagaattttttttttcttttttttttttttttttttttgatatggagtctttctctgtcgcccaggctggagtgcagtggcgtgatgttggctcactgcaagctctgccttccgggttcacgccattatcctgcctcagcctcccaagtagctgggactacaggtgcccaccaccacacccggctaattttttgtatttttagtagagatggggtttcaccgtgttagccaggatgggctcaatctcctgacctcgtgttctgcccgcctcggcctccgaaagttctgggattacaagtgtgagccaccgcgcctggccttcgggtagatttctttaaaaagatattgaagtaggctggaaaatgctacattgaaaaaaattctatggcggtgacatttggagtggcatagtttaacgttaaccccttagctgtggagcatagatataaaagtagttattatattttagggggaataatgtaagtctataaatcaataagatgtcaggataagatggaggtgtagaaaaaatatttctaggaaacagtgagaaatcttatctgcttaggtgatagctgtgaaagatagattaaatttttaaaagtaaagatggacatcccaggcagaaggaatggtaagccagaaataggcaagaaaggtcatatatgtttggggaatactgaacagttggtttgggatagactagacgtctaaggaaattataatagtgmgattttactttgttaaaatctaggctytcagatggccytcatgattttacacaggttgaacattttcatataatttttctgttgtttttcaaaggccatgcgtagtcacgaaggaaatgaagcccaggtttgttatttcataattcagttgctgttactcaaaccaaacgattttagaaatcgagtaagtgactttgtgaaggaaaattccccagagcactggttacagaatgactggcacaccaagcacatgaattatcacaaggtactagtcctaattrgtatttcaaatagtccttttaaagccatacttgagtatttgatgaagtgatttggccgttttctctctggttctaatgttttttctcttgtctatatagaagtaagttagctctctgaacttcttcaaggtttgagagtttctataatgttgagaataaattgaaactgcagttttagtggacataaggacttctataaaaagaagtaaagtataatcaagtataattttaaatgtttccttgcaaaaaaaaatctaaacaaygttttcacatttagctcttttaagagaattttttaaaaaatgctctaaccatttatcatcttctcaattccacagaaatatccagagaagttgtattttgagggcctcgcggaacaggtggatcctcctgtacagatccagtctccctatctgcccatctattttgggaatgtgtgtcttcgattccttccagtatttgatatagtaatccacagatttttagagttgcttccggtatccaaatcactggagactctactggatcatctaggaggcttatataaatttcatggtgagctttttccaattttaatttcgtctaatacctccattatcaaaagtaggatgggcaggaccacatggtaatagtggctctaaaggttttattttaaatattttaaaaatgaagtgttttgaggataagtactatggatggtgccatgaagtataaaatatacaacataaaaatataaacaaaagtatgagttcagaacagggtgatgttactgtaaactaaacagatcttggcggccttcttggatgggtaggatttggacttgatgcatccaatttatagcagcagcagggaaaatatagcacacgaggcagaagggatcatttgggggaaatcatggaggagataaagtatatttgaagaaaaattgctacattgggttgaattgaaaattcttaccagagagttctagaaataagattggaaagacagattgtacctaactgtagatcaccttgaatgctaggctgattttgtaattgcagataataatcaactggaagttattgagtatgatcatggcataggaaacattatttcagaaagatacatccagttatagttggcagcagtcttaggatgaagccattacaaggacatgtcaaaaagctcagttgtgtgattagtatctaagcaacagtggttgcattgaaaatgagagaaaagggacaaatggtcacaaaagaaggaacaggacttgattggctggttataaggagaatattgaaagaaaaagacaactaaaattttaagcatagttactggagagtggcagggtcagtgacagaaatgtgaaggtcctggagcagccactctgggaacaaagtgtttgtctggcaggcagtcctgcttcatctttaagataccttccctcagagcagaagtatgaattgtgtgttaacatggtagaataggcataaagttcaagtgagcgttcttttaaaaacatttttcttttggattaggtaatatacatacttgatggggtggagtatacagtgaaaggtaattagtcccatcctggcctccagctacccagtttctttcgtaggcagccagtgttaccagtctcttgccatcccctcttagatatcctggctggttttktttgtttgtttgtttgtttgtttgtttgttttaacacaagtgttctgtaccctgtttgtttcaactttatcatgtattagggttggtcatttgtattagtacgtaaagagctgcctcatacatgccagatttactttatcagtcccctgtttttgaccttttaggctgtttttcatctttcgctagtataaacagggctgcaatgacatcccttgttgtatgtcaagggattaaaatttatgcaggataaattttcagaaatggaattgcttccacttaaataaaaacaaatataaatacaaactgtatattactagaaacattctgagccttctgcctctcctcagattaaaatattcatagtatacaattgcccagcatgtgaagttgtttcataaatcttctgagctgtttttcagttatctggaaagcagttgatcagtttttcacagttattagtaaccagttaaacattgtggtggtatgtttttttcttggcagatcgtccagtgacttatctgtataacactctgcactattatgaaatgcacctgagagaccgcgcatttctcaaacgaaaactcgtccatgcgatcattggctctctgaaggataatcgaccgcagggctggtgtctaagtgacacttacctgaaatgcgctatgaatgcacgagaggaaaatccttgggttccagatgacacctactattgcagattgattggcagactagtcgataatatcctttttattgtgattttagactcccagaaataacagtattttgatttatgagaatatattttttcttttaaagtaattttttatgtatttcaaggttttaattttttttaagatcacttccattttcatctctgtaaagatttgaaatcttaaattaacagcatcatgccaattaggctgaaattctgttaaaatttttattttagaacttgaggataagcggtaaaaaaattatatttaaaaatagactttatggagatttgtttcaaagaaaaaatcttattcttacatactatattttgtagcacatgcatctgtgtgctactggagaacgtaggatcttgttactttaaaaaaattaatgtttgtagtaaataataaatgataaaatatatttttctttattgaaaaggtatattttagtgaaaatatacttggatgtttatttcttcattttgattttatattttcagttattagcactctatacttaatgtctataaccataccactattttactaggtaagaaattctacataaatgagcatgacttattttcctacacaaaggaatttattttctgaagcaaaagaatgactcattagaaaataattttcatattaatgtcttataactattaaaagaaataggctcatgaaacctaggtawaccttggttgcatctgtggctattatatgtcatatttataagaacccacctgaaagaccaaccatttatacctgtggttaatcaaatggttgcttttaatacatttcaatcatgtcaaactcatttgtatttggtttgcatttgcctcttaatctctctaagcgtagacaaatcacttcttggcagctcataatcagataaattgacaatcagatgagatagtccaattgttattgctttaactgtgtgcaccgatggctggcaaatctcctggtccctttccaaactgtgactggagattcaatgagtttcccaacccagctgcccatgctctccatgttacttgtgtggagctcatggccttggcagtttcaggcaaagaagttgggaatgcccttctaaatgttgtcctaaaaaggtatgtattctggttcatgcagtaagatttgttgtttatttgtaaatagaatggtattctatttcaaacttttaagacaaacctgttgccgcaaggctgatgcacattggatgatgactgttttctggttccagatcttgtctttgtgatataggagttatggaatgagccctggacaggatcctaagatccgggtttgttcctacttctactcattaatagcagtttgacatttaatataggaataatgttaacttgtcacttaaaacaagattctcttcatcttgttttcaagatttcaagattcttttaaaaattagcatgaagtatgggataatgattggggaggaagtatttttaaaaagccttcttgagtttttatgcatattacatttttattcaataaaaaattccccattgttttattgaaatggattagttgtcgatcctctgaattagacatattctttaaaaataagatccgttgtcagccatctaaaatgtttttataaattcatacttacattcttttttgccggttgcagtcagcctttagtgccaagagagaacattacagcatggatgaatgcaattggtttgatcatcactgccctaccagtgagttaataattgtgatttgtacttagtgatgaaatacagccagctgttccatgtcagcaaaaagaaaaagatgcatataggatgcccttgtacgggacgtcatgcaaattaatgaagtattttatgtttttaaagttttttcatattattactgctttaaaaatctacagtgactagtttttgcttttctgtattagatctaaatatatctatgtgacttacgggtctctgcattttctggtaccaccttacctatccaactttagtttttacataatagcttgatctactcttggccacttaacgtgttgtatatctacagcctttgttccttcagatagtgcttaagacatgttttaggtacttctgaatgtgagggaataagacatttttcttattccagaagcttcttctttccatcaccttctctaaagcctattcattctttgctagcttagagcctcctttctcagtgaatgaagccttccctgacttttccagctcacatgaagactcctttctctgacctccacacatatttttttaaagtttattatttttaaataagtaataaagctatagatttattgtttgataaattaattgatttactgcatagtgtatatcaggtacctaaatgagctggacagatacatgtatggagccccttaactcacagttacttctcccaggttgttactgacttaatttgaccagttacaaagccacccagctgtattgtgcagaagctggaaaaatagaaaactttaaagaatgagaaaacactattactttagactttggggtggaatgctggataagtgatatttttcactagctttcctccgattttaaaggagccatattggattgttcttcatgatcgaattgtgagtgtcatcagcagccccagcttgacgtctgaaacagagtgggttggctatccattccgcctctttgatttcactgcctgtcatcagtcctactctgagatgagttgtagctatacgttagctcttgcacatgctgtgtggcaccattctagcatcggacaactttctctcattccaaagtaagtataataatttcttaaagaaatttgacgtaggctgggtgcggtggttcatgcctgtaatcccagcactttgggaggccgaggtgggcagatcacaaggtcaggcgattgagaccatcctggccaacattgtgaaaccccatctctactaaaaatacaaaaattagctgggcatgtggtgtgtgcctgtaaccccagctactcgggaggctaaggcaggagaatcacttgaaccagggagctggaaattgcagtgaaccaagatcgcgccactgcactccagcctggtgacagagtgagactccatctgaaaaaaaaaaaaaaattgtatttcattttgttctaatctcattaacagatgaggtatatacttcattcattagaacaacttgcggctgggcgcggtgactcatgcctgtaatcccagcaatttgggaggccgagatgggtggatcacaaggtcaggagattgagaccatcctggccaacatggtgaaaccccgtctctactaaaaataaaagaattagccaggcgtggtggtgtgcacctgtaatcccagctagtcagcaggagaatcacttgaacccaggaggcggaggttgcagtgagccaagatcacgccactgcactccagcccaggcaacagtgtgagactccgtctcaaaaaaataaataaataaaaataatcaagtgaaagtaatagccagtgagagatgtgagattaattagaaatattattgttaccaaattaaaaggaactttaaaaaattatattttattgtaatactttgtawatactgtatgaacaaaattcaaacaatttaaataatttcaagtcacaggagatttttatcttcaaattttaggtttcttactgaagtacttcttcctatagtgaagaccgaattccagttgctttatgtataccatcttgttggaccatttttacaaagatttcagcaagagagaactcgttgtatgatagaggtaaaatataatctgggtttcctgtgacatgattaaattctgaagtatctatttaagtttctttaccagtgttattgaaactgcaggtcacaaccattagtagtgaaactagtttaacaggatccaagagcaattttagaggacttagtttgccagtaatgaatttagggtgggatgtattgaattggagatgcagaggaaacgcccatcatgaaggttgagaagaggttaaggatggagaagtacatttgagatcttacagtgcagaggagctaattaaaatcatgagaatggatgaagtcagtcacttctaacaaaatgtcgcaaacaaggaaaggacccaggagtagaaccttaaagcaagagctaccaaatggaactaagaaagtataatccaaaggatccctaggagtggagttatcccagacatcgagagatggtgtctagaaaggggattgtttatctcttgattttaagagaaattacttaactatgaagagaaattttatttaagccttgtcaggggcattttgtagcactatagattcttttataaatgcaagccatatcatatctcatgtgcatagaggtgtatatggtatatgacagttctacagcaaagacagtatcccccggtgctagtgttgtaatggagcccagctgcatcatgctgaattactgaatcacttgatcacttaaataattttacattatttgttaaatagattggtgtggcgttttatgacatgctgctgaatgttgaccagtgtagcacccatttaaattacatggatcccatctgtgacttcctctatcacatgaagtatatgtttactggtgacagcgtgaaagagcaagtaagttgaatttgtttaattatttttaatgatgtttaatttagaaaacttgaacatatagtaatagacttttttggtttgggtgattatttttattttgtctaattttttcttttaaggaaaaagggtgggtatgagacctttttaggcatcagaggcatattattctagatgtagtattaaaggaaatacatgttataatttcttgtacttttcccccttgatatttgcaacagaaaatctgaaaaagacctagagggttaattaatagtaatctcattagggagaaacagtgggatatggctgctgaaatatgagcagagaggttgttgtgttatgagtaaaggaggtcctgcttctcctgacactcatggtgacagtagacaaaccgcggcataactagaagactaaagtcaggattctagactaatcctgactagagactaactcatgaaaagcatttagagaatatgggaatgcttatcctgaagaaaaaagtcctagggaattatttatgacctcagcattttggagggttttcatttggaataggtattagattcgttctgtgtcactttagagggtgtatgaattctggtaaagttaaagggaggccaccctgacttagcatatgaagaggaacttcctaatggggatgtctgaaagtagaaaaagaccttgaatcataactgagtttcctacgtgtaggaaacagaatctgggccattttaaaggagtggaggtaggacagatagggaaagttaagtccatcctcctacccctcccagtactttaggttgagatgccaaggaggttgactcctttatgtctcagcagcagtgtcaaagagagttgacctgttctctctcatgtaagaaagagagaaattgtatctgcttttgttacaacacagaacatgcagagaaactgtaaaagaaattgtttatttgtttgtttttttaaaaaaagtattctttacatttaggcctaagaaactttaacacaagggagtacagaaaggaaaaggtcaaagagcatttgagtaaagctaagaaagctgtgaaacgacttgatgtgtttgtctccttagtgtttttcaaaagagtagatctaatattatttagttaattccaagtgtaaatcaaaaccaaaatagttttatagataaatgttgcaaacatgagttattcaaagaactttataattatgcttcatgcttctgtaaagatggcattttaaaagaatgatcaacttgttggatgtataaaatttccagtgtaaactctgctagcttttggtagtgggatgactggctagctagatgagtggatacgcctttgtaagtatatgcatatatatgaatatacatatggtacatgtacagacatgcacatataatatataaggggtgtgtgtgagggagaacgtattgtttctcatgcaagaaagaaatcattgtatctgcttttcttaaaacacagaacatgttaagaaacttctcatctaccccacgacactccttagtttattgtctccggatatgtgtaaatcctgctttaaatgtgagaagttgaaattctctrattaaagtacgttttaatgtgtttttatttcttaggtagagaagattatctgtaacttaaaaccagctttaaaacttcgtcttcgattcatcacacacattagcaagatggagccagctgcagtgcctccacaagccatgaacagtgggtctccagcacctcagtctaatcaggtgcccgtgtctttaccagtaactcagtgaagccagactgtactgtggagaaagtagaaatatatccgtctttgagagtggactcaaaccttttaaatctgaatgcgatcacactgtagtgatatagtagaagcagtgatgatattcagattgttttattttgattcaaatgatgaatctgttgacaccttataactcccatctccctatctatatttttgtctctaagagatcaagtaagatacatgttgttcatattcataacaacttattagagctatgtaggaacatagaggtatctgtgatcaaatgacttgtcattggcactttcagtctttcctattctagccgttgtttttgtttgtattttttattattaatgacatatttagtcttcagatatattattttaaaggcaccacacatgtaaaacagttattacaaatattttatacataaatctcttggtagattttcagaataatagagatttatatcaagaaaaggaatctagattttgttgcattgtaggagcaaacaaggcttcatattctttttaaaatgacttgaaattttattataaatttccatagtttctatcaaggtcaactggcagttttattacctttgctatggacttgaacttactgtataaaattagttggaagccatgtaagaaaataacatctgaaaattcttgaacttaaaatcatgcttaaatggttgattctccaatttctttttttaaaaataagttaattgcttttgcaggttgacactctcacctgacagatgatgtaattcttcaatttttataatcttaaaatttttaaattttatatttgtaaatacagtacacattttatttcttggattttgagagacattgttaattttgggggaattggcattgcgaaagacttgaaaactaatgagtaaagtctgctgaatgaataaaccgtgtgattgtttcccgactccattggaatgagtgtcggctgtgtgccaggtggtgtgctggctggggtcagttggaaatggggtactctgtggttcctacactacagttggtgactgacattggcctaggaattaagagttacagattcttttaaaaagaactagtgaatttaaccaactgtatttcaaattcatatttctaaatacattcctcctagaactttattttctttgtagctcatgtaattgccatcactaaatcattactggccatgcaagtccagctaaaaatttatataatggtaaaagtaatttttgcagacttactcttttctttttttttttttttgagacggagtctcgtactgtcacccaggctggagtgcagtggcatactctgggctcactacaagctccacctcccgggttcacgccattctcctgcctcagcctcccttgtagctgggactacaggcgcctgccaccacgcctggctaattttttgtatttttagtattagtagagacggggtttcactgtgttagccaggatggtctcaatctcctgacctcgtgatcccccgcctcagcctcccaaagtgctgggattacaggcgtgagccactgtgcccggcccctgcagactcattcttaaaattacccagaaaacatgctagagattatttcaagtgttaatcttagcatagcgtcaatgtattcttgctgccttgaggaatttattgctttttgatcctagaatgaggataaaattgtgacactagtattatacaaacaatagaggaaatgaaaatcaatataatcactttctcaaggacataaacattctaattaatttattacaaattcagttttccctctctagcttaaaaacatgggaatataatttccctggataggcttttaaatatgtttttaatcagagactaatagaagacaaaaactttatttgggtttagaatacagcagaggggaaaaaaatgcctttatgtttatcacatcctaaaagtttttctttttgaaaattaatagtaagtttagagtggctctgtccagtatgactttctgcaatgatggaaatgttctttacctgtgctattcaatacactagttagcagctacatttatctaggaagcatttgaaatgtggaactgaattttttaattttattaagctttaatttaaatgaccacatgtggctactgtattagagaatatatcttagagtgagatccattataattgctcccatctaaaagtaattcaataaaatgtttatctttcaaaggcctaggagttattagaggaaacagtttttaaattctgtgttacatttgaaaaatcagattgtagggactatcatatagctgttaaaacaaaaacacaggagaaatccattcatggagcctaccttttttacaggaccccctggggttttcacataaattactgggaggagaaaaactttgcttcccttgttttgattaccgtttactctggtttgttttttccattttccttactacactccagagccaagatgagtttttaggatatagctaatgagatatactgtaattgcagtaagtgaagggtgaaacgttggaagccataggtaattttagatgacatcctcagctgaattagtaattattattaaaaacaaactagcaatttgatttatgtggctcctgaatagattttggggaatatggttggtttttttttttttttttcagggtctcattctgttgcccaggctggagtgcagtggcgtgatctaagctcactgcaacttccgtctcctgggctcaagcagtcctcccgccttagccttctgagtagctgggactacagatgttcaccaccatgcccagctagtgtgtgtgtgtgtgtgtgtgtgtgtgtgtgtgtattttttgtagtgatggggtttcaccatgttgccaggctggtcacaaactcctggactcaagctctttgtcctcccaaagtgctgggattacaggtgtgagccaccacatccagccaggaatatcttccacctcccaaaagctacttgaatagcaaccatgcttttaaagtattaaccaaaatcatgtttgaggtttagaaaaagtaaaacatggacatctagcccaatgaacttgtagattgcccaaacctattattacccattttacagttgaagaaaccagagccagggagtttaaatagtttcaaggcctcacagtgttttggggatgattgatttcactgtgacttttcaaatgttttgtattttaacattaaaaacttagtagttttaagcaggacgtttttatgaatgtggggtgtgtgtgtgtgtgtgtgtgtgtgtgtgtgtgttgcatgtatttagaaatatgtagacacaatataatcttgttataaagagtttattataaaaaatcacattttttgaatgacatggacacatagtacctttccacatgtggtagctttgtctcctgattccaagagtcccactctatgtatgggggcttatgtaagtgtgcttatttttaatgccagcaaatttttaattggaaatcaatgtacacttctctttctaaggataagtcttttgccaagttagaaaatataagcttttaaatttcaaaaaagttagaatttccacatcttgaattttacaccaagagggaatttgtagagtttatactaattggaaaaacatttttctgaaagaacaagtctttagaaggataactctatgcttaagaaaatgattagctttctaattatgccattaactatgagatttatatcggatgtttccacatttacttaggtgggttaaggtagtcaataggcttgtgattaccctcccgagcaagtccgaaacaagccaaggttattgcaactgctgtgttcactgttcgagttacttcttctggtgtcttccccagggatgggttcacttccattatatctaatcctgagagtagccctacaacaacaaattgtaataatgtaatttataaaatagttgacattttgaaagtagtacagacagacttgaaagattatccactaacagaaaaaggtagtaaccgatggaaaacactttagttattgcatcatgtgactgatggacattctgaaagtgtcagctgggacttggttttcaggtcaaggaggtataaatatatattagtcaagtgtacacttgcttctctattacctcagattgttaactacctgttttgtagatttcttctgtgatgtagagaccttctctgtatgtcagacctcccacgactggtgtgccagtagctggtgtgaaagatgggtccagtccgtcaacatcaaaacttagatgaattggccttttctttcttttaagaagtgggaaaggatttcagtttaaggttgatggcttcacatttcatagataataatctgttaacttgttttataaaaagtagcaacccattatttcatgtaaagactttattaataactttggttgtcagtagcaaccttttctgttgcacacacatgtgtgcacacacaaaagaatcctaccttcctagtagatagctgagtgtttcttccatcaccttgccaattcctagtctgtccacttcagtcattgaaaagtatttaatgcctagagttttcaaaatgtagctataaaagagaaattaagataattataattaataaggctgactgtgcccgcctgtctccttttaagggaaatataaatatagtaaaatatataaaacatttaggttctatgaacctaactcaatatagttttatttgtatttatttttaacagcaagtcaattgagatttaattgcctggatacatacatatgtatgtacatgtatataaatatatgtgtgtgggcatgtgtgtgtgtgtgtgtcttgatgtttaattttctctcatagagttggtcagtaaagcatatctagcacacaaagggacaaaaatggaggcaaatcacatcaaggaataagcttactgttccccagggtccacgtctctcaagccaatatacacaatatccttggcagatatacagggagtcacccaggagaatcctggcacatcgggaatctaaaattacaatgttttcacttggttatgtatgattctcttgaacaaatcctacattcaaaggtaaagacacatattggattgcgtatatcttatatttagaatataaatacagaagaaatcatgtaaaaataatacacaattaagaagaggatgtgtgcctccccttgattgctttgactttgccttgaaccagttggcatttacctactttgtgccccagtcctgctgggcccttctttcccagggctcctctataaagaaacgattgtgctcccattactttggtagcttccttctttacttccctttctcagtaagtccttaatccagaggatggcctagagcagctgagggaaatttgtggcctgtcctttggttattcttaatgtgataatatgatgatatctgctttgtcctccaggacgtttagtttttcccatgtactaggcagatactttgcaagtttataaacccatcccttggtcattagttcaaaagacattatttctgagcatttaacataaggaggttttaacctcttgtatcatcataaggaccaaatattataattgtatcaataaaaactttttattgatatactatggcatatcaacaaactatggcatatcaacaaagttataagctgtaatattaaatcttaatctgccattttattttccatcttttagaaaaggagtttctagggagcagggagatagttctttctcttatgatttagataggtgcttctcccagtaaatacattagttcataaaccattatatctgaaattttaaaatttcttttttgaaaagcctctatgatatagaaggactactcagtaagaatgcagaactgtgtggcatgtagtggaaagaggaaggaatgaggagacctggtgctagcccttgcttcactataggcttggcatatatcttgggcaagttggttaacctctgaacctccactgacctgtttataaatgattactctctgccccacctactaaaaggatagtttaagaattagcagagaaaatatatattaagtcagtttgcaaggcagagatagagagcctcactgccttttatcaaccaaccctttgcttattggctgcagagaaaatgatttgagattacaccaagaataagataacatggagtttctcatttcccttccacctcctgaatgtctactaaaaagtattctattgcactagagtaccaaccagtcttttacctttccttttagttccttcaggaggaaagatacaggttgtccatgcaagtttccacttgtggttgtcagtggagtgttgatatcagtgtgagcatccacccagatgactccaagatcagggtggaccctggcatggccagagatgcttccaattgccaaacttttggggaaaaaattttgtgtgaacatcaggtttgcagtgtcactacatacatcatattattcactcaatgctcccacttggttttcctttgagtcacagtgtctgatatttctgataggttctgaattggagatgccaattagttaaaacaatagagaaagcataacttacacttaatgctcactaactagttatatttacatcgattgcattactaaaaaaactgtgattttttttcccaaaatccaccttgtaagaaaaccacgattagagcgtagccaaaaaaataaatgagtataaaaatactagccacacaagaaattccttagcatgagacactgttcaattctcagagttaaatttggatcattttctgtacactcatctctcttggtaaatacttaattctctcaagtgaattatgacaaagtctttcaatttttcttaaaatccagcttttataattt

SEQ ID NO: 97644 - DNA, 13243 bp, Homo sapiens
aagtggtccgcccgcctcctccttccaaagtgctaggattacaggtgtgagccatcatgcccagcttctgtagcttttttgtaagagggacagacagccagggcctctctgaatccctcagcagttggcattgtaaggaattcatcctttgctccacaccttggttgcctgtggcttcacccttctcccgcaggcttccaggctcactgcagttagattcctgagcccctttccaacctagaaccccaaacttaatgtccccataatcgagtgtgggaaagttcctggctgaggggaggggttggctccacctgcaggcaccctctgggcccacaccctgcaaggagctgcctctggttagattggctccggggtctctgagtttagggcacagtttagtcagggttgttttatggcagtatgcttgatgcatatttgtctgcaattaataaacaaactcttggccattaagaccttgaaaaagcatttgatttgtgaaattggttcctttcttccaggcttcagatgatcttggtaggtgggtttgcaggctttctcaccctgttcagataggaacacttaaggaaaacttggtaggatgtgttgtctgtttatgaaggaagaatcctgcagcagattttcttatccagtccttgtgctttactccattttgggcttgtcaataaaatcagaaatccagatatggatggctctgaccttagcttggaacacaaaactgatacttctaaaacaaagctgtgatgatactgttttcaggttccttacttgtaaacaaagctgggcctccagcctcatgctggagaatgctagctagcacgactgcctggggttacagccaatgcagtccatggccagtagaacatttctccacgctggctttttgctagcattaatatgtataatcaagctgaaattggcctgccatgttgtaaatagaaaagaagactaaagatgaattttcaagaacagattaaacaccaagggatcaacaattctttttctgaaattctaagtttctttacctaacaaagacctttgaaggaacaaaaattaaatggcctgtctcttttttaactgtagtggaaaaaaataaccgtgctggtaagattatgatatatgtatgcatttgtggcacagcttgaagatttttaggaaatagccacactggattctataagggaagaatgaacagccccttctccccaacacaacaaatgatatattttttagggctgtaaactgtcatcagtatctaatcccttaatagctgaatattgatatcagtttagatcacaggcaactattttatcgatagcctaaagtgggcctggcatgacgggttgtgcctataacccaattactctggagactgtgggtggatcacttgaggccaggagttcaagaccagcctgagctgcatagcaagaccccatctttaaaaaatacaaacaaacagcaaaaagcagcactggtttaaagcaacatttgtaatctaaagtgaaaagtcaatttgaaataaaaatcatcttcatatttttacatttgaccaggtcaagcgttagggggaaatgactgttatcaaaccattatatgcactgttgcaacttctttaaaaatataaatgacccctccattaaatggagaattatttcctttttctaaaagtcttttctaattctgaaaataatattagcttattgtaaaaaatttaacataaagtaaaaaggagataactaggtctctcataactcaatattttatttatatattcatctttttacacattgagatcatgctataaatatcatttttgtcctgcctttttctctgaacactgtaacataaatctttttccatgctttagaagaattcaaatacccaagtaatttttaaataatactaaataacaatatatttgttattacatattttaatttatatagaaatgtgatttaaatatatcagcaatgggattaaaatataaaacaatgagatttttttaaatcttctattattaataactcaaatgcagaacagattaattcttttaaaaagccattcttcaaactttaggatttcttattcagtcagaatcatctgcatttcatcaactacatatcgcatggtatttacacctacacatcactttatttgctttgcctgacaaaatgaaaagtattgggaattgttcagggaaatatgccaaaagaatcttagggactcatgagttttacatattttcccagttacactaatgaaaaggaattttgtttgagaacttgacttggagtgcagctgcagggcatttgaatctcagtctccatcaggcctgcacccatttctgtgcagaagtttctagaatttccctgaattggttggacagagcagctaaaaaagcagcccaaactgatctgggaatagactgaatttcacattaaagaaaaatttgaatcattcacatcatttcatctttttttttttttttttttttttctgcagagggccaaatacccgattggattttttaaaaatgtttcaaccctttatttcggtacaatgttaaaataatctgacttttctatgatttggcttttctgccttgagtaactatttaaatatctgtgtgattttcttttatttgtgctacttctagaacaaaacagaggtatttagaagaaaccacttcccacagggcctttgaaccgtttacctaagtcaagtgtaatgagaaacataaccaaatgcaccatggggtttattgttagataataaaaggcttaaaaagcccctagaccctaaagatgcctgggatggatgatttatgttcatatgctacttgagcatgtagttttggagtgcatggtgaggcccatggctaatggcagtggtgctattcaacaagattctgggtctttagaatagttcaaagttttaccacttctctctggataagccatctttttgacctttgagtaaattataaacttcttttcagattgtgtccaaatggtcacaggtactttgacagtttttactgtaactgccaataagtaatactcatctttaaaaagacatcattctggcagggcatggtggctcacgcctgtaatgccagccctttgggaggccgaggcgggcggatcatttgaggtcaggagttcgagaccagcctggccaacatggtgaaaccctgtttctattaaaaatacaaaaattagctgggcatggtgatgggtgcctgtaatcccagctactcaagagggtgaggcaagagaattgcttgagcccgggaggtggaggttgcaatgagcagagatcacaccattgcagtccagcctgggcaacagagtgagactccatctcaaaaaaaaaaaaaaaaaaaaaaaaagcatcattccattgtcaacccttttttgctgttctgtgccctgaacaggtgatgtgatagcggtgcaaagagggtgagcattgtcctttacctcaacaagtgtgtggcctggtaggcgagacaggcatgtcagaatgcttatcatgaagccatctgaaaaattctagaataatcatataatcaatgctctagatatcagagagggggtacagaaatctgccgggagaagtggaggaatgtaatgaacaaaaatcacagttccatctctatgaactctaagctcccatagaaaaagaaattagagggctgggcgtggtggctcacgcctgtaatcccagcactttgggaggctgaggtgggcggatcacaaggtcaggagtttgagaccagcctggccaacaaggtgaaaccccgtctctactaaaaatacaaaaattagccaggtgtgatgacgtgcctgtagtcccagctactcaggaggccgaggcaggagaattgcttgaacctgggaggcagagattgcagtgagctgagattgtgccactgcactccagcctgggcaacaagagcgaaactccatgtgtctccaaaaaaaaaagagaaaggaagaaagggaggaagagagggagggaggaaggaaggaaggaaggaaggaagggagagagagtaattagattaccttaaggaaagaaggaaggaaggaaggaaggaaaagagagaaagaaagagaaattagattaccttggtgctcattctttcgtatatccccgttgatgatttggaatctgagctaaagatactggggggaaaactaaaccaaattttgataccaaatacaggaaggaggtgaaataagcttttttattgtagctctccttttattgctcacaataaatacttcctactttgtgattttcccgaactgtattagttggcagaaagctgagcagtcctgtgtttctaattaagaattggatggttagctggagttttgaggaggtcatctctgggcgtgtctgcttttggctttcttgggcagctatgctagcatatccttgggaatgaaaatgtaatccttcatgtgacacagtttaggtaaaccacttagtcctttgcaaacaccaaatgctcagtgcggtacttaaatgacaccatatttgatgccacagtttctttacaggctcttctaagattgtaatgcctgtgggcttttaactgcccttattgatgttgtatccaagaaaacagaaagttgactccaagcagaagtattaatatctttgtataactttcagtcttcacgttgaccccactgcagatctgctgtttagacagatgcagaggtgactgataagccggggtcatgtggcttcaggagtcttaggtttctccatgcagcggtgtcaggataggctcaccagctcctggccacagtgggtaccagcgacctccttgttgctgaatccaccgaccactctcggtcctcatcctgcttcctgcctcagtggcgtttgactttcctgttctggaaacagtctcatccttggcctccttctgagacttcctgtcatgttctgccttcttctccagggtcctcttattttttgtgtttttagagacagggtctcactatattgcccaggctggtctcaaactccctagctcaagcagtccttttaccttggcctcccaaagtgctaggattacaagcatgaaccactgcacacagccgggttctcttattttatactacgccttcttagtttccttttggactctcttcttctgacaactcattacaagcaaatgtgcttaactcttctgtccttatcccttttctcactcggtgcactgtccttgggtgatcttacccattccatgctttaaatggctatagttatgatttccatccatggagaacctggttaagtcagatggctggctttgcctcccagctctactgcttactagctgtgtgactgtcggcaagttgcttacactctgtgcctcagtttcctcatctatcaagtgagcgtacaaataattaaccccataaatatgaagcatagcacctctcctattaactgccccaatccactctcagttttatctagttaacatttattaatttgccgggtctcacctaagatgttacttcctacaggaaacattcccagatgttcaaatctagttagatcctttttccatgtaccctcataattcagtctgactgccctatttccctgtcttagtgtttgtcacatttatcgtaattgctgatatattcagatcagctggaagctcgtgaggatagagatgaagtctgactggatcatcattttgtccccagcgtctagctcagtgcctggtacatagcagtacttgacaaatatttgctgaatgaatgactcatggaattgtagggtatgatgacgcctctaaagacattctttctttgtggttacatccttaggttttgtagatcagaaaactctattagattggttgtggttgagtatccttgacaacatggctgacagtaactcatggaagaccaaactgtaaaccctaatgacagcctttaaattttttaacgatgcttgagagctaagctggaaggacgtggggtgcttwtccctygtagaaatgcctgccaatgctttctcatttggacccaaactccagatygggagcagtcttatagctggatcagctaccaagagaaattctraagcaagaagagaaaagcatttcaatttgggacatttatttgcacctggaaatggggaatgggctatcagaccagacttctrtcctgtccaacctgccttcattcagtccttccacattgttattctgggtytggactgtgctggaaagacaactgtcttatacaggctgcagttcaatgaatttgtaaataccatacctaccaaaggatttaacactgagaaaattaaggtaagcttgggaaattctaaaacagtcacttttcacttctgggatgtaggtggtcaggagaaattaaggccactgtggaagtcatataccagatgcacagatggcattgtatttgttgtggactctgttgatgtcgaaaggatggaagaagccaaaactgaacttcayaaaataactaggatatcagaaaatcaaggagtccctgtacttatagttgctaacaaacaagacttgargaactcattgtctctttcagaaattgagaaattgttagcaatgggtgaactgagctcatcagctccttggcatttgyagcctacctgtgcaatcataggagatggcctaaaggaaggacttgagaaactacatgatatgatcattaaaagaaaaattttgcggcaacagaaaaagaaaagatgaatatcaatatctattatatctgtgtggagtaggttttctctggtctgattttgacaaatagaagagtgtctacagcgtggtttgcctgtctgccctcctggatgctattaaagctttgttttgttgaacaatcagatgcccaactctgttgccttgtggaagatgagtaaatgcagtgcttcttaaagtggtttcttctccctaccccacacatcttttggtactaccatttggggaagccaagcaaggatagtaaattgatcagaacacagttgtgggaatttggcctgaagttagtgaaataaaactttaaagagtggaaaaaaaaaatttttaacaatgcttgtgatgtactaaagaacaattttatgaggccttacttggtaatgtaataggctctcttcaatacctaatactgtgatgttatgaacatgggaacatttggttttgcaaagtgttgtcatcaacaataagattctcaagagcagaagtttccgccatagtatgcacagggcctgtggactttttgaatatttgaaggactgtcatatggaaagggatcaggcttagtgtgtaggactccaagagctaggacacaacatgaatgcagatgccttctctctagaacaaagaacttttgaactgtaacagctgtctgtaaatgagtgggccaccccagaggtcatgaccttatcaccatctgtgttcaagcatggcagggagaagccctgggcagggatatctggaaggagaaggacaagtggggactttagggtcccttctaatcctgagagtctggcagtgccctactcacccaaggaccgttgagctaggccctgtccccaaaccataggccctgtgcccacaccctgccccaataaatggctcaggaagaacaactgctatatactcatcagcaagaaatgccccaccatcagctgaattatttaaaccattttgatgagtggttttatggcctttcttgaaactgatgttgttattagcactgcctaataccttttccttttttggtttcttggtaaaggtgtgtctgtatcttgactttagcttatgcctgtcctgtgtgatgtgagtagaccataatagcccgagaaaattaaattatggagtgcattttgaaatgagcaccctcagatttgattctggtgtcttcggctggttttgcataggttgtctgggaaatattataaaattcactttctccccccgaactcaggatcacacccacccctcttggagaagggaagagcacagtcaccatcgggcttgtgcaggctctgaccgcacacctgaatgtcaactcctttgcctgcttgaggcagccttcccaaggaccgacgtttggagtgaaaggtactgtctttaacaactagtgtacttttcagggcaaagttggggggagagaattgtaaaaagaacattgtcaacagataaagagttaagacttttcaggggacttggtacatttcttcactgcacactcagtacatagtggtcgccccatgttggttcccccgggcatgaaaaagagcagtgggagccgccagggcttcactggatgcctcaggagcctgttcctggggctgcgttgctcaaggctcccgcctcgagtgcggtctcccatttcatcagggccttctttgccaagtgatcttgaaacacggccatccatatcggtgtttgatcatcccagtcccggggaaaggtctttccctctgctttagtctcggctcattggagttgctgtgtggggcccgcagagctctctggagacggactggctgtggacagcgagtcgtgatgaaattcctccttggccgtggtcgggctgatatctggcacttccccattcattactctttcttccctgatttatcatgaaatcattccttagctcactttacagtggtggttattgctgcaattacagtttgtccttggcacttcgtgattttttaagaatattgcatttgtattactgttaaacatattaataacgtatctcataaagtactgataacgcacagagtgtcatgcatcgtgtagtggaatgaacactagggttggagcgagaaagccaaggttttggtcacagctgtgtttcctaccgccatgtgacccttggccacttgagccagtcacaacctctcggagccgcatctctaaaagtccaaaatgctgagagcggcaccaggctcacccagttgttgtgaggatcaaatgagaaagcacgtaaagaacgagggctactgtcaaatgatacacacatgggcggtgttgttctgctttaggaaagagcagtccttttactctaacaaccaacattttgagggatacgcagcatgacaaatctcacatactattatctgaaataaattgaagtttataatttactcatttgaggtggttatgcggtggtttttttgtttttgtttttgtttttgttttgagacagagtctcacttggttgcccaggctggaatgcagtggtgcaatctcggctcactccaatctccgcctcccagtttcaagtgattctcctgcctcagcctcccaagtagctgggattacaggcacccgccaccatgcctagctaatttttatatttttaatagagatagggtttcatcatgttggccaggccggtctcgaactcctgacctcaagtgatccgcctgcctcagcctcccaaagtgctgggtttacaggcatgagccacctcgcccagccacagtgtattttttttaaacaaagtttgctcagatatgaaatcatatacaattgatttagataaagtatagtcacagagatctaataataaattatcaaaatattctcatatcctggtatgttttacagtaatgacatctgctctatttttaccttttttttttaagcaaagaaacagaggtatagttagacaaagtgtcaactttttttgttgttgttctgcttggatataaccattagtgtctctcactgccttttgttacttcatcttgggtgtgacgcctctctgttgggtttggggagctgtgtcccttggcctgtgtccatcgtggcagctgtacttggtgacccgtttgaaatgcctcttgctctgttgtttaggaggagccgcgggtggtggatatgcccaggtcatccccatggaggaggtaagaccttgaagagatgcgggtcagctatcactgtgtttccttcctgacatcttgtctctgctcccatccacacaggcccacagaccctcatccataatcccaaagtcattaaggctctgaaaccccaaaatgtttgcataactcatgcagtgacaaaccctagtatttactgtgatgagctataattatatggattttgtacgtgctacttggcgtgaatattcatatacattgctgtggaaaaattatttttgattaacaggtgctgacctagcccctgcttggggtgttttacaaataaactacatgtaaatcacactgccttcctaaacttcaaaaaattcagaatcttgaaaccctgctggccttgcgggtctggatgagagaatgtgggtctgtgcctcccttgatcatctgctgtactgccaagttcacgaagacttgacgcttcccctctgtcaattcaggctctagtgcgtgcctcggcagcatagatactaaaactggaatgacacagagaggattagcatggtccctgcacgaggatgacacacaaatttgtgaagtgtcccattaaaaataaaagaccccaaaataaaagagttccagaggaaaatgggcaaaaagaactgacgttgttaattctcacttctgtaagaactccacctttgttccacataacctctttgttgcctgtaactaaccagtgaccagctcttttcagtttcactctctgcatcagccttatcattcagggcctggacaatcttccaaaacccaaatctgagcaggtcactttcctgttctgtcatttccgccgttgcctgtcaccctccagcacagcacaggaggtcctcgtgggtggctgctcctgcttccctgtccacaagtccccacctgccttctctctactgcgtcaagctccttgcagactctttttttttttttttttttgagacagagttttgctttgttgctcaggctggagtgcagtggcacagtctcggctcactgcaacctctgcctcccaggttcaagcaattctcatgcctcagcctcctgagtagctgggattacaggcaactgccattgtgcctgactgattttttgtattttagtagagacggggtttcaccatgttggccaggcttgtctggaactcgtgagctcagacaatccactggtctcagcctcccaaagtgttaggattacaggcgtgagccactgtgcccagcccttgcagactcttttcctgttctctcttggttccaggattttcccatgcctggaacattcttccttttctgtcctctttacccagtttagtcaaggttttttgtcaaggttcttctctaccccacagactccctctgtgtttacggctatctggttcagttggctgtggcgagttgcgggcctttcttgaggtctcaggtcccagcattgagcagagtgcccagcacatagtaggaactcactagaaagtacttgttgactttgttaaaggaatagaagtgtttacccatggaggtctgagtgtcagggaagctaaagagaaaatctgtaggaacttcaagtactgggagtgggggtgagaaagagtagtccaaggcactgctgaaaaaaatcgtcccaggcctcaggtcagaatggggatgggtaccattcatgagccagcaagacccagaaccaggaggccaaattagaggtggtgtacaaggggcatacacaggggaatggctcgggtttagccagcaaattggaaggacattggtgtcccgctggtttagggcatcagctgcgtggcttggaggagagagctacttttattttattttattttattttttgagatggagtctcgctctgtcacccaggctggagtgcaatggtgcaatctcggctcgctgcaacctctgcctcccaggttcaagtgattctcctgcctcagcctcccgagaagctgggattacaggcacctgccaccatgcccagctaatttttatattttaatacagatggggtttcaccatgttggtcaggccggtcttgaactcctgacctcaggtgacccacccacctcggtcttcaaaagtgctaggattacaggcgtgagccaccgcgcccagccaagaagactaccttatgagggtagagtgggccagacacactcaggcaatttgttccttgaagttgagtgcctccagtcttttcttcatctgtatcctcccagctctgagcaccgtgcctgacacttggtggatgtttgttgactgtgtgccaggcacagacaatatgtactggacggaacataataaatcaccataggggaaaatgttagaataaattccagatgggctgaggaattgaaagtgaaaacactatgactggaaggatgggaaggagccggccttgtgaagaatgagggagagcattcagccagtgggaactgctggtgggaaagtcctgaggcaggaaagggtgtggcctgttcagggaactggaggacaccagggtggctggagccccgtgggccagcgggagttgggggggttgaggtagagaagtgtgcaggcgccagctctgtcgagcgattgcaatttgtagccaagaacctggattttatttgaagtgccaaggtcagccattgaagggatcttgacagataacacaatgcagattgagttttattaaaatcaccctgtcttctgtgtgatgaaaggaccaggggcctctcagtagacacgatgaatccaggaggaagactatggaagtagcctagggaaagatgtcagtgacttggcccaggatgggggcagtgaggatggaaaagaggaaaaaacagtttaagatttgtttgctgatgtttgcaggattagatgttgggggttagaaaagaggaggattcaaggacgacatccagggtactggcttgagcaactcagtagactcatttgttgaggcagagaacaggggagtgatggtatgaggtttgaactgtgtggtgtggggtgtggtggagggtggtagtcagaaggagggagtcagtttagaggcctatgaaacatgcaggtggacatcaagtagacggctggaaagaaaaacttacattccagttgtgaaatggccaaagagttcaatagaaacatcgaaaaagaaatattaactaaatgcatattcatcttcaccaataatcaagtaaataaatctacattaaaaccactatcaggccgggcacggtggctcatgcctgtaatcccagcactttggg

SEQ ID NO: 97645 - DNA, 12540 bp, Homo sapiens
tggccaagatggtgaaaccccgtctctactaaaaatacgaaaattagctgggcgtgttggtgggcacctgtaatcccagctactcgggaggctgaggcagagaattgcttgaacccgggaggcggaggttgcagtgagctgagattgcgccactgcactccagcctgggcgacagagcaagactctccttctaaaaaaaaaaaaatcactctcacaggtgctcagggttaggacttaagcatatcttttaggggacacagttcaacccagaacactcaactgtgtggcacaacaggtgtgttcggctctcttgtccctggacagacacatagccatgggacagaccatttaactagagggccccatgggttccaggaagggcagggcagcagaaagtaggccacttgatgacttcgggtttgcacagtctcaggttgggctttgactctgagctgtcttaggcagcccagacctggggactctcggtcttattcatgtccacgccacagcactgcagccatacctgctggcttctatcctgactccccatcgtgaagaaaaatgaccacattcctaaacctcttccctgggagacaactcctaatcagaagcttgaaaggctcagggctgcttctcctaccccagggatcaaacatgtcctcaccatattctaaagacacattctttccccgcaagcaccccgcctccttctccccactgactcctgttcctgagcccagaacctctccctcttgccagcatattctcggcctttgcagatgagcttttgtggcctaaagaccttcttcttcaaccatctctgagttacggctccaagccaggcacccaggattctcatttcatttgtttcactaccaggagtccacttgaggacttgttgttgttgttgttgtttgagacagagtctcgcgctatcacctaggctggagttcagtggcgtgatctctgctcactgcaacctccgcctcccgggttcaagcaattctcttgcctcaccctcccaagtagctgggattacaggtgtgtgccaccacgccccgctgatttttgtattttatttatgtatttatttatttgcgacagagtcttactctgttgccaaggctggagtgcagcggcactgtgtgggctcactacaacctctgtctcctgggttcaagcaattctcctgcctcagcctcccaagcagttgggattacaggcgtccaccaccatgcccagctagtttttttatttttagtagagacagggtttcaccatgttggccaggctggtctcgaactcctgacctcaggtgatccacccgcctcagcctcccaaagtgctgagattacaggcgggagccaccacgcccagcctaatttttgtattttaatagagatggggttttaccgtgttggccaggctggtctcaaactcctgacctcaagtgagccacctcgtctggccaagtttttttgttgaggctttgttgctaaaacactaaagacctaggctatggtgagaaagataagggaaccataaatgaaattacattaaaacaaagtgtgaaattgtttgttttgagttgtggatgttgtttgggggtgtttgtatgtgttttttgctgaggagcgggagctgtgttaagtttgagccataactgcatctttgatctttgttatttcagaaaaaataaaactctagaaaatgaagtaagggagactagtttaacaaagaaacccataaactcaagtgttgataaaatgttgtttcatcttttggtgtgagcttgtgtgttgccaatgtcttccattccccagtaaggctgtggggaaataattgctatttccccaattgctagttggcctagcaattctctttttatgtcaggaacccattatgttacatttctgccatttgtcatttttctccagaataagtgtgtttgattctcccatctctcttggacagtatttttccagcttttggtgagttttcacatgctctccaagtaggtcatataagtccaattataccttaatcactgtagttaggactcaggtcctactcagggatacatccttagcattattaatgcatacccttaaatcctttattacctactccctaacaagaattcctccagatcttatatacggggcctgcagggcaggacacaggcctatggtaattacttccaatgtatcgggcattgtgctaagcactttgcatgggtggtcacagcacctctggagccaagtgttgtcccataagggccacaaggcttcaagaggacggagcctaccccttggtcactgaggggtggccctggtctgcaaggctacagaactgccttgccaccctgtggcactgcctctcatttcatagctggcacatgtcattttgccacccccatcacatgtcatgctggcatcaacccagggaggtgggtagtatttttgttgaagagctgcaagaactctgcccagagaagtcgacaacctgctcaagttgtgcagctaataactacaaaagccaagactcaactcagatctgttgactctcagtattaccccaacctttatgccccaaaccaaaggatgcccttttcatttcagtcacgggtaaaatgaactttggcccattccgaaagatgataccagctatttgaacagacaggtacttgaggataatgaggtaattttttctaataagtaaagataattgtttgggtattaaaagctatgattttgtcataattctttttagtccaagtataatagagccagctctttcctaattctctaatggaatggcatttctaccccttacccaccccccaatccaaggcctctttcttctttgtgaattgctaaatacagttctgggctagtgggcagtggttcaaaacccatcgtttgaccctgcttgaacaatcaaaaacagatccagtgtcctaagataaaaccactatacaaagcaaacattccctctcagtggctcctcggtaatgacccagcaagtattgtctgtttcccgtgcctctcactatagccatcagggaccacttctactaataatcagaggtctgcggctattcaaaatgcataaaataaaaatgttaaagcttaggtgacagcttggacaaacgtgggcatctgaaaggaaatgtctggcttgctgacgttgctccttcagggatcacaccgtagatggtgtgcatacccaggtgcggagcagcacactcattattcccccaggaaagtgttgaaggcgcgttccactcaggaagaagattgtgcttggttgatgacaactttctgtccttcccttcctcacctttctagcctgtctcacctcctaggaaaccgtgtgaaaccaaaggtgaacattatatgccaaaaaacatcagaattggagctctccttgctccctcttcccaagacttctctgtagtgccttcactgtggttagaataagggcatgactcattcttttggatgtcactaaatagaactaattaaaatagattttttgtcccagtgaaattgatccggctgttgagtcttttgtttaaagattattggaatgaaggatttgatacttttccccccattcttttttctcacttggaaactttatcatatttctgagctttggcaagattcattcaaatgaacacacaataaagtctggcaaatttcctgaagaattcagggactcccttacttctttattgtactgtgcaaagttacgttgagtacggaatcagattcactccagtcctgctacaaatgtttgttatttacaaaagaattgctttttcttgaattacatacacagaaataagttcaggaaagaaattagtttctttcctaaactggctttagggcatctacagacaaatggttaaagaaaatgtggtatgtatagagagtggaatactacttagccattaaaaaagaatgaaataatgtcatttacagcagcatggatggaagtggaagttattatgtgaaataagctgggcacggaaagactaatgctgcatgttctcactctcatgtggaagctaaaaagcttaccctcatagacagaataaatggtagataccagaggctgggaaggatgggtggctgggaggaggttatgaagaaaggttggttatgggtacaaacatacagttagacgaagaaataagctctaatgtttgatagcaaactaggatgactatactcagcaacaatattttgtatacttcaaagtaacaggaagagagtggggtgtacttgaaatgataccaacatacagtagtaatgataaatactcaagataatggacaccccaggtaccctgacttgatcactacacattccaggcacataataaacactcatatataccccataagaatataaaatattaggccaggtgtggtggctcatgcttctaatctcagcagtttgggagtccgagtgggtggatcacttgagcccaggaattcgagaccagcctgggaaacatggcaaaaccctgtccctactaaaaatagaaaaattagccaggcgtcatggcacgcacctgtaatctcagctactcaggaggctgaggcaggcaaatctcttgaacccaggaggtggaggctgcagtgagctgagatcatgccactgcactctagcctgggtgacagagcaagactcggtctcaaaaatatatataatgtatcaatacaagggaaaaatgggcagaaattttcaatgatatttaataaccataaattaatcttgagttgggttgctgcctgccagcccttctgtgaacatgatttgttcagtcccaagtcacaaaccacagggttacaaagtaccctgggagggtgcctgagctctgtggttttagtcttgaaactttatcttttcacaaagcaattcaaaaattgctcatcaccattgtgttccgagaaaaggggcgccaaggcatcaccctgagccatccgaggagtgctgtgtgccttcttcctttctgcttccaagtaggatggaagctccagctttatacttaaataatcctcatcaacatctaaaagatagtgataattaaatctctcctatctaactaaaatggaatgttttaaagcttaggtaacaattctgaaattcttaattccccccaaaacaaactttttctgagcacattttgatttcttattcccatgccagaatagactgttttgtatatggtatcttccaagatattttcccactgagttaacttctgaaattgcttcttccaacgcataagcaataaacaacagattcgtttttacattctcaccttagctattgcatctctgattgttttcatctataatgagactttctatactttggccagtccttctgtttttcttaaaatgtgggaccacaggccaggcacggtagctcgcatctgtaatcccagcaatttgggaggccgaggcaggcggatcacctgaggtcaggagttcaagaccagcctggccaacatggtgaaaccccatctctactaaaaatacaaaaattagtcgggcatggtggcgggtacctgtaatcccagctacttgggaagctgaaccctgagaattgcttggacccaggaggcgaaggttgcagtgagctgatatcgcatcgctgcactccagtgtgggcaacagagcaagactccatctcaaaaaaaaaaaaaaaaagtgggaccacatactctaagcacctttagacaaaaccacaggatacaaatgtaatgtggctaatcagctggtcttccaccacccacctctggagcatggaaggccttgtccagccttgccttgccaagccaagggtcatctctagtccactgagcccaccctctaccctagcacccctcctgtcccaagagtcattgaccctcaggtcaagggataccagagccactacagtgaggctggccgtgtctctgaaatattttctttttttttttttgcccttctctcttcctcggcgctgcctatggaggtggcagccatctcctcctcggcrtcttggccgccctcagaccccttgtgaagcccaagatcgtcaaaaagagaaccaagaagttcatccggcaccagycagaccattatgtcaaaattaagcgtaactggtggaaacccagaggcattgacaacagggttcgtagaagattcagggtccagatcttgatgcccaacactggttatgggagcaacaaaaaaacaaagcacatgctgcccagtggcttccggaagttcctggtccacaacgtcaaggagctggaagtgctgctgatgtgcaacaatcgtacttgtgccgagatcgctcacratgtttcctccaagaaccgcaaagccatcgtggaaagagctgcccaactggccatcacagtcaccaaccccartgccaggctgtgcagcgaagaaaatgagtagacagctcgtgtgcacattttctgtttaaataaatgtaaaaacagccatctggcatcttcctttaaaaaaaaagaaaagaaagaaatattttctttcttttctttttttttttttttttgagacgcagtctcgctctgtcacccaggctgaagtgcagtggcacgatctcggctcactgcaagctccgcctcccgggttcacgccattctcctgcctcaacctccagagtagctgggactacaggcacctgccaccacgcccagctaatttttttgtatttttttaatagacacggggtttcaccgtgttagacaggatggtcttgatctcctgacctcgtgatccacccgtgagccaccgcgcctggcctgaaatattttatttttgttcatctttgttgtgcttataatactcctgttttctgtttattcccctgacttgaaccagatgttaggggagtatttgaagctcctcgttccctctcttcatcaatatcttctgtctagaaactaaccaagcaccttatctggctccagacctctcagtgatctgtgggaggccaactcgcaggatttcagcagagtttgcactttctaggcctaaaagataagtccttccatgtgtaagttcagattaaaggcaacatattgcatttacattttagagaggtgaacacattattttctgggacttaagtgttgttttgtttcttttttttttttttaatgtagtttatttctctttctaagagattacaggattcaagaatggcaatgaatcttaatagcctttgggagaaagcagcaaagctttaatactaagttccaggaccatgaacttccatgttgtcctaaatgcatttttcaaacattgctttctgtgcctactctataaaacctaaaaatccaaggtgacagtattccttatctaaaatcctaaacaaggctgggcgtggtggttcatacctgtaatcccagcactttgggaggacaaggcaggcggatcacttgagcccaggagttcaagaccagcctggccaacgtggtgaaacctcgtctttactaaaaatacaaaaattagccgggcatggtggtgcacacttgtaatcccagctactccggaggctgtggcgggaggattgcttgaacccgggagacggaggttgcagtgagccgagatctcgccactacactccagcctgggcgacaaagtgagactctgtctcaaaaaattaaaaaaaaatttttttaaatcctaaatattctcattccacaggatcctgcaaactgtagatcccaaacttggaagttctgggaattctgccagtatccccaagtaaatctccttgggaagtttagaatgctgcatggcgtagctgtgcctgctcttatagagtggtgcagactctgcttctccacgtctgctaagtaaaatattccaaacacagatcagccttatctagcgaaccatcactctgctcttgaattttcttttggcctcaaactctagagctataacatgttaacggtttaacaccagaggagaaagctattcttaaactactcaaacatggtttttttttctatttttcagactcctgaaacagactactctttgcctttttgctgcagttggagaagaaactgaatttgaaaaatgtctgttatgcaatgctggagacatggtgaaataggccaaagatttcttcttcgttcaagatgaattctgttcacagtggagtatggtgttcggcaaaaggacctccaccaagactgaaagaaactaatttatttctgtttctgtggagtttccattatttctactgcttacactttagaatgtttattttatggggactaagggattaggagtgtgaactaaaaggtaacattttccactctcaagttttctactttgtctttgaactgaaaataaacatggatctagaaaaccaaccagcaagttttcagtgccagataaaactctgcgctctagaggtaactcctcatgggaggcagctaggagtgttacctgacaccagtttcctagaaaactgtgacaagcaaagcaataacacacgtcgagaaatatctgatcaagcgggaaatcttctgactgtcggggatctctagtaagatctcttggaatgaagtgcactgtgtatccaaaactattttccagcgccagtgaagttgctcttacctaaaacaaatgggtttatgctagtttccaccaaggaatgagtctcgatggccattaaactttctaaggcccacagggctaggaaaagtcgctcttaaaggtcaggtgtttggaaaatgtttttccttttgcccaacccttaattagtagtagagaatgttctgtggcctattcccctctctgggagttcctgacccttctttgttttccagtttttcctacaataatataaaattacgtaaaagttaaaacaaaaccaaggattcaggaagaaacaagcagtgattgtcctctaggcagcgtaaggaaaatagtcaccataaatatcttagatgccccccaggcacatcctgcaggatcttttctgcatcctcttgtcctacaccctccagtgaccctgctcagccattgctcagcccataatgcacctttatgcacaatttgtcccaaaacactgtttagtaactcaaaagcctcccactcaaaagctgtctgtcccaagaataatttcacttggcaattctgaagtgtccttccccatccctgccctttatttgggagtacacctctccaaatatacagttaactgatgttttactgtttatttggagaggtgtactcccaaataaagggcataccctctccctttacagtaaatttgtaaacccttataatcttccaatagatttatacattgaaaaccctatatattccactcagaaagctgtctttttttttttttttttttttttttttttttttttttttttaagataggggctcactctgttgcctaggtggagtgcagtggtacaatcatggcccactacagccttgacctcccaggctcaggtgaagcccccacctcagcctcctgagaagctgggactataggcacgcaccaccccacccagctaatttttgtattttggtagggacagggtttcaccatgttacccaggctggtctcaaagtccgggactcaagcgatccgcccgcctcagcctcccatagtgctgcgattagaggcgtgagccaccgtgcctggccgtgaattgatttttaagcagttgtcttctgctactcatgtttttattcttttcctctgcattgaaaggttaagtttctatttttgaaaacattttttaaataaatattttaggagtctccattcaaaaagctttagcctagggactcctttccttacctacttttaccagacaactcctcaactcaaaatgtaagtaaacatcctgcacaccagtgtgggagagttttccactgctcactttggaaggactatcatccaggtgctgctggaaaccgcaaactgtttcccatcatgtaggctcattcgaagtcctctgggtgtcataactcgggctctgatggagttgtttttgctcattcactaccctactgatggtagagtgtatttgactccagctgagtgatatgcagtctccactaagaagaaacgttaattaatgggctcatcaactcctgatgacttgaggcattcatagagaaaaagaagtattattatggggagtactgggaggagccagttatcaaccatcttttctgaggccacagcatgagaaaagaaaaatcacataacctttggcatggtgggtttcagttagaaatcttcccaagaagagtggatattgatttctttctgcctttaattgaaatgtaaaaaacgaataggccagagatggtgagtggctccaattacccactgtggcacagaaatgtgtgatcatgccccctctctgcttgaggactggcagtagtgacacctgccaaggtgaagtcccagaccagaagaatcctctgtgaaagctgcctgaagaacacactataggaattaactggagaagagatgcataggaacttcggaaagcatcagcaaggcaatgagccaacccattcattcgtatttttttttttttttgtctttttttttttttttttccgagaccgagtcttgctctgtcgcccaggctggaatgcagtggtatgatctcggctcactgcaacctccacctcccaggttcaaatgattctcctgcctcagcctccgaagtagctgggattataggcatgcaccaccacacccagctaatgtttgcatttttagtagagactaggtttcgccatgttggccaggctggtctcaaactcctggcctcaagccatccacctgccttggcctcccaaagtgctgggattacaggcgtgagccaccactcccagcctcattaatattctttttattcctctattgtcaaggttattttgtttaactagagtgtgtatgtttaatacacttaaagctataaggagtatttttcacaatagatatttaaagagaatcctagttccctcccatctgagagtagccacggtttcgtttgtttaactacaatgtgcccagcctgtttttaatcataatttacacatgcccacaaataagattgtggcatgtgtaaattatgataatttaccgtatatattcccagaaaatccacatactacatatttgtagattgctttttcataaatgtgttcgcacaagggaataaaaattcagtaacaagtgcattctttttttttttttttttttttgaggagtctcgctctgtcgccaggctggagtgcaatggtgggatctcggctcactgtaacctccacctcccgagttcaagcaattctctgcctcagcctcctgagtagctgggattacaggtgcctgccaccatgcccggctaatttttatatttttagtagagacgggttttcaccatcttggccaggctggtcttgaactcctgatctcgtgatccacccacctcagcctcccaaagtgctgggattacaggcatgagccaccacacctggccaacaagtgcattcttacagcatttgttacaaacctataatccatatcctctgaaaaagtcaagcattatgacaaaaccactggtcaatcaacagatcttcatgtagcaccgtaaactctaatgcagccagagacagacccaaaactctaacagcgacttcagaacagcagaatggactagaattcaggggtctgaatttgagggaaaaaatgtaacatctttatggctataatgtagcatttccttccctatgagtgtcagcaacaaaacacagcactatcgacagtgctgtgtcttttttgtttgttttgagataggggtctcattctgttgcccagactggagcgcagtggcacaatcacagctcactgcagcctccacctcccaggctcaagcaatcctcccacctcagcttccccagtagctgggaccacaggcacaccaccacacacagctaattttttattttttgtagatacaaagtcttgccacgttgtccaggctggtttcgaactcctgggctcaagtgatcatcccacttcagcctcccaaagtgttgggattacaagcatgagccaccgtgtgtggcttttttttcttccctagccactagacctccagggaaacagtagctatgtctttgtcgtagatattttaatattacatgacagtttctacaaatacagtagcatttatgcttctcactgcatcaaaattatagtagttattagatctcccactgtctttgtatccatgtaaataaagaggcacctacattgctataaccaaatgtggtaccttttctatactttaataattgcatttcaggctgggcacggtggctcatgcctgtaatcaaggcgggtggatcacttgaggttaggggttcgagaccagcctggccaacatggtgaaatccaatctttactaaaaatacaaaaattagccgggcgtggtggc

SEQ ID NO: 97646 - DNA, 15613 bp, Homo sapiens
ccgggttgggccaaattcccctccccctacaacttgaaggggacacaactgacagcccgggggggtttgtggtcctttggagacctctttgcttatttccttctgggcaggggagattagaggaggattatcattaataggaaggggagctatagggaggctgggatatgggggtaagccgagaggtcctcctttggaatgtaaatggcaagctttgcatagttgtgtattctccctcaatgaaaagaaagcttgggcataaggtatttcactccatttgccttccctcttacagaaaagatcaagctgcaggatggtattgtaatttgtacttcccgcaggtggccatttttccccatcagaaagagaatattggggccaagccgcagtgcagaaaaaaatgagccgcctctttttcagggtttgtgggtcaaattggtcccaatggcttaggatgcatttcaagggtgagcctgttgatgcctgagtgtttcccatctgaaagacaaaaccacccacggttttggtttgttttgtttctccccctgcccaagaacccgcaacagtccctggaccctgttgatcggaatagttgcgctcactgacgcagcagcagaaacaacccctgcccaagaacccgcaacggtccctggaccctgctgatcggaatagttgcgcttaccgacgcggcagcagaaacactagttttcctcccagaccacatggaggaccgaggaaggtcggatttagtggtccttgccgacgcattctcgaaaacctgcacccttgcctgtcctcctagaccacaaggaggaccgaccgagaaaaatcggatttagtggcccttaccgacgcattctcaaaaacctgttagagtcctaagcattctcctgttagtattgggactttacccctgtcctataaagatgttatgccccaaaaatgaagtggagggccataccctgaaggagggaaggggtctccagggttggaagagtgacatcttttgtcctaacttatatgaataggaaggatacaatttctgaggctccccatatcctagcttcaggaatagcttttgttaggcctgtcagtgtgaggagggatcctaaaattccaggtagtccccactacgatggggctttgggcaaaaattatgtctttctgattggtgagcccaggtgcctaaagaaggtaacagagtcctggagtttatactagaaatcattcttatcggagaaactagaaaagcaccagagacaggtagcaatttttagaagtgggtctaacctcagagaagggaggcaagaggaagtttgtctggcaggcattaggacccagggggctagggtcaggatagataggatagatgggcgggtctcgcttgggcgacatgcttttgagagttctgctcatggccgcggggtcaaccaacatgttgtcaggaccccagagctgcatggccttcctctctgtcgaccctcggctcagcccagaagtacaggaaaagcggaagctggttctaggcaaaccaacggtcccaactccgaagagtcgggggttgttagagagctctttcccagaaagtctgacacccatgtctttagtccagcagccacgctagtcacttttaactggccgacaggtgcctggtatttagcccccgaattctaaggaaagataggacagaatagcaagcgaaaggggtccaatggtactcactgcttggcgataggcaatggtctcaccgctcggcaataggtgatggtctcactgctcagcgattgtctcaccgcttggcaataggcgaaagtcccttcatggtcgccaaaatgtgtccggaattggtgggttcttggtctctcactgacttcaagaatgaagccgtggaccctcgcggtgagtgttacagctcttaaggtggcgcatctggagtttgttccttctaatgttcagatgtgtttggagtttcttccttctggtgggttcgtggtctcgctggcttaggagtgaaactgcagaccttcgcggtgagtgttacagctcttaaggcggcgcgcctggagttgttcattgcgcgcctggagttgttcgttcctcccagtgggcttgtggtctcgctggcttcaggagtgaagctgcagacctttgcggtgagtgttatagctcataaaagcagtgtggacccaaagagtgaacagtagcaagatttattgcaaagagtgaaagaacaaagcttccacagtgtggaaggggacccaagcgggttgccactgctggcttgggcagcctgcttttattctcttatctggccccacccacgtcctgctgattggtagagacaagtggtttgttttgacagggcgctgattggtgcgtttacaatccctgagctagacacaaaggttctccaagtccccaccagattagttagatacagagtgtcgacacaacggttctccaagtccccaccagggtagctagatacagagtgtccgttggtgcattcacaaaccctgagctagacacagggtgctgattggtgtatttacaaaccttgagttagatacagagtgccgattggtgtatttacaatccctgagctagacataaaggttctccaaggccccaccagagtagctagatacagattgtccactggtgcattcacaaaccctgagctagacacagggtgctgattggtgtatttacaatccctgagctagacacaaaggttccccatatcctcaccagactcaggagctcagctggcttcacccagtggatcctgcaccggtgctgcagatggagctgcctgccagtcccgcgccatgcacccgcactcctcaccccttgggtggtcgatgggactgggcgccatggagcagggggcggcgctcatcggggaggctcgggccacacaggagcccacggagggggtgggaggctcaggcatggcgggctgcaggtcctgagccctgccccgcaggaaggcagctaaggcccggcgagaaatcaagcgcagcaccggtgggctggcactgctgggggacccagtacaccctccacagccgctggcccgggtgctaagcccctcattgcccggggccggcagggccggctggctgcggcgagtgcggggcccgccaagcccacgcccacccggaactccagctggcccgcaagcgccacgcgcagccccggttcccggcgcctctccctccacacctccctgcaagctgagggagccggctccggccttggccagcctagaaaggggctcccacagtgcagcggtgggctgaagcactcctcaagtgctgccaaagtgggagcccaggcagaggaggcgccgagagcgagcgagcgagggctatgaggactgcccgcacgctgtcacctctcagttggatttacagtacattgatggatagaatctgggatgcttgcctgggtaggagggggaactccctggactgagaagcagtggttcccaaagaacaattgaggttcccactttagacaaaaatcaactcaaaatggcctgtaaaaacctgaagtgagccagacgtcatggctcatgcctgtaatcccagcactttggttggccaaggcgggccaccgtgacttcaggagttcaagaccggcctggccaatgtagtgaaaccccatctgtacagaaatacaaaaaaattagccaggcatggtggtgcacgctgtagtcccaactactcaagaagctgaggggggaagatcgctagagcccagggggcagaggctgcagtgaactgagattgtgccactgcactccagcctgggcgacagagtgagatcctatcttaaaggaaaaaaaaaaaaaaaaaacctgcaatggtaacactacttgaaggaaacatatggggaaagttctagacattggtctgggcaatgatttcttggataggaccccaaaagcaaaggcatcaaaagcaaaaacagacaaatgggatagcacccgactaaaaagcttctgcacagcaaaagaaacaacaaagtgaagagagagactacaggataggagaaaatctttgcaaaccatacacctgataagggggctaatatccaaaagaaacaaggaactcaagaaacaaatatccccatttaaacatgggcaaaggacctgaacatacatttctcaaaagacacgtgaaaaaatgctcaacatcgctaatcgtgaaggaaatagaagttaaaatctcaatgagataccatctcacacctgttagaaaagctactaccaaaccatgggagacaacaaatgctcgtgaggatgtggaggaaagggaagccttatgtgctgtttgtgggaaggtaaatgagcacagccattttggaaaatcatatggcagtcccttagaacactaaaaatagagctaccgtgtgatccagcaacctcacttgtgggtagtatccacaggaattgaagtcagcatgctgaagaggtgtctgcctccgtgttcactgcagtgccattcacaacagctaagacacggcagcaacctgactgcccagcatcagacggatggataggatggtctgtctatactgttcagccttaacaaagacggacattctatcatttgtgacaacatggatgaacctggaggacgatatgctaagtgaaataagctaggcacagaaagacaaatactatacggtctgatttttatggggaatctgaaaaagttgaactcctagaagcagagagaatggtggtcaccaggggctggagagtgggggactagggatggggagaggggagacattgctcttagggtacaaagttccagtcaggaagagtaagctgaaggccctgttgcacagcatgacaaacatccctaacaatagcgccttgtgtatttcacagttgcctgaagagcacattttaagtgttctttttttcattagcctgactgactctttctacaatgcatattgtagaaattgcatttctacacatatcacatcagaacaccatattgtaccccatacacacctacggttatgttgattaaaaattaaaagaataactggggagaagagaggagagggaatgctggatggttaaaaccagccaagatcccctgcagggggtgacccagaaaccaaaggtgagtaggagtggtcaggtcaaagggcagggagggtggcccagtttgggaggggagcaggccgttactgtgagatgccaaggggacactccttggtgaggtgaaaaggggccgtgcctcaccaaaggattcagattttattccaagcaggggtggaggcgggatgatctggttcatgtttcagagtgtaaactggccacccccacagggctccatcacaggagccccctcctgtggctcccctcctctcctccccagacctccctcccctcccaccttcccatgcaccccctcccctcctcctatgcgctccctccttcccacaaaccacttatcacctccacagccctctgtcacctccggcccaccagcctcctcacctgggagcagggccacatgatggtggcaaaaataactccctttgacaaagtgtgaagggggcagagggaggagggaagctgagccccagcgctaggaaggagctctgagagggttctgagctctgggtcaccctcactcactggggacacagcagtcacgggctctgccctcatgagtgcgtacccactgccagcagcagcaactcacactgggtgaagtagctcccagagcggtaagggccgggagctggactgactcccaacacacccagtcccctccaaagcctgccacaaccctccaggctgaggactcccccagcccctccctcaaccctgcgctctgtcctcaggtccctgcatggtatcagcgatgcttcttcaccccatttccgaggccgggtgcgttcccgccagccccagtcctcaggcatttctctgagtctccgcccaccgccccccgtctgggtccccatggcgggcactgcggcagcaggtgggcagcctccccgggttagcatgcaggagcacatggccatcgatgtgagcccgggccccatccggcccatccgcctcatttcccactacttcccgcacttttacccttttgcggagcctgccctgcaccctccgaacctgcgccccgcagcggcgtccgccgtccgctctgcaccccagctgcagcccgacccagagccagaaggagactcagacgacagcagtgagtaggggcgggaagagggggacaccctgagctcagcccagccaggagggggagtggggtgtccctaccatctggccatggaggggcaaggcaggaagcacgtgccatgggtgggggcagactgagctgaggtaggaggtgacgctgccttccacctgcctctagctgccctgggcaccctggagttcacacttctttttgaagcggacaacagtgccctgcattgcacggctcatcgtgccaaggtgaggatgggggtgggtgttcctgggacagagggctggggcacgggcctgtctcatacccactgtctgttcccagggcctcaagccattggcctcaggctccgcggatgcctatgtcaaagccaatctgctgccaggggccagcaaggtgagggcaagccccaggcccccactgctgccctctggtggaacacccagcctggggcacccacttggctctgcttggctcctccccatcctgcaaggcctaggtctcagttgctgggatgtgcaaatagtggggggtcctaccagggaggtagggttgggggttacaggacggtcttagccctaggaggccctgacccacccggcttgggccctaggccagccagcttcggacacacaccgttcggggcacgagggtacctgtctgggaggagacactcacctatcacggcttcacccgccaggatgctgagtgcaagacccttaggtgaggatctggcctgggccacctgggggtggagcagagggatggggctggcctggccaggtctgacctgggcggccaccaggctgtgtgtgtgcgaggacccatggtacagcgacagtggcaggcaccttccctgggggagctgcgggtgcccctgaggaagctggtgccaaaccgagccaggagctttgacatctgtctggagaagcggaggctggtgagtggggctggagcacaggtgggactgcagaggccaggaacctgtgatggggggagctggaggggaggaacagggagggggatctgggcagcatctggccaggatgaccrggctctctgccctttcaggccaagaggcccaagagcctggacacagcctgtggcatgtccctctatgaggtgggtaggacaactgggctgagcagagatgagggggcaggcctggtggcaggggcgtaggggacttggaggaacctgaggccagctctcataggccctgtgagccctcattgtcacaggggacagccaggtgrcaaagtgagggtgactcccttgccagggcagcccagaggagctgtggggcactgggacaagcagagtccctgggggcgcagctgggcagagacctgccttgaggcagaggctgaaactggcggcatttgtccacggcccgagatgggaggctgggcgaggtggaagagaggacagatgggtggggctccctggctggggtctggcctgaggggagtgtgggggccactcctggggcaggctgtcctagacaggcccttgtccggaggcagtgagggtgactggcaggggtttgacgccactagagaccaaagacctagttagaacccctgtggtcggtgggggaggcagctgggaggctgagagcggggccctctaccagctcctccccaaagtgccgggtgccccgccccctggtggagccacaagttgctgcagctgtcgattagctaagcccaagtggctgaagcccaccaaggtggcatggacaggccacttcacccagcgccagccccgtgtaccctccgccccagatcccaagcacaacagcgcccggagcatggtgggtgctcacagagcacttccgcattcctgagaaccgcctgtgagcaaggtggtggggctttccgcaaatggaaacctaccctgcgggtgagagcagtgcatcctccccgggcttcctccctgagcctgttcagaagcaccagggcccagagtgtgacaaacgacactcagcatctggtccccagggaaatagggggtgaagagggtggggttttgaagagatctgcttctccttgggaagtgaacatcctctcagagccgcttgcctacaggggtggctacacacactggatgggaggccacttagggagctactggcatgtcagccagttcgcttcccctccatgacagacgtatctgactggtcatgtggtcagcaagcctcgcctttggtcaggccctggagggtacagctgacccatagggccacttccatggcactgggcaagtggctgtattggaaatgaagtcgttgcccccgatttctttggggccaggttgagctttcctgcccagagcacggaggctaaagggggtgggctttggactggattggggctgacctcagcctacacctgcaggaggaggtggagacagaggtggcctgggaggaatgtgggcacgtcctactgtcactgtgctacagctctcagcagggtggcttgctggtaggtgtgctgcgctgcgcccacctggcccccatggatgccaatggttactcggaccccttcgtgcgcctgtgagtgaactggggtaggcaggcgggaggtgaggataaggcggtgactcctcacctctccagggccacacctaacccgccaatcttccccgatcagtttcctgcatccaaatgcagggaagaaatctaaattcaaaaccagtgttcacaggaagaccctgaaccccgagttcaatgaggtgagccagggccaggcaggtcccagccaaccctggccttgacatgctgagccactaccctaccgtggcctgcttcttaagctgtgggagagccgaggctgcctccttcccgcctctctgcccttctccctgcaggaattcttttactcaggcccacgggaggagctggcccagaagacgctgctggtgtctgtgtgggactatgacctaggcacggctgatgacttcattggtgagtgggaacatgaggagctggggtgggggcccagtaggctcctggcggttcctgacccatcccccatggcaggcggggtgcagctgggcagccatgccagtggggagcgcctgcggcactggcttgagtgcctgggccacagtgaccaccgcctggagctgtggcacccgctggacagcaagcctgtccagctcagcgactagcccatgggccctgcctgccgcccctccactacagctgcctgaaacgtccccacaaaaatgatggcggctggggctgccttaccctcatgcccagccccaagtcagagaggtgtttcctctctccccgctttcacattcaccccaccccaaatcatggagccgaaataaacatctccttcaagccagatgagaccctgtcctttctctggccatgggccagactggaccctgttctcccctcccacccttgaggatcgtgtgctgggtaaagggtaaagagcacagtcacagcagcggcagctggagggtgggcagcactcgctttattgtccagcattccacatggatagacgcaggacagcaggccagggtggtgggctaagaggcagcctgccgggcctgatgctgctgggcaaaccgctgcatccgctcctcgagctccggccgaaagtggcggatcagaccctggggtcggtggggggaccatgtgaaacagagtccaaaaatcccccaacaccctgggcccttgatgccacccaccctccgtgctacgcagaagggtggtgaatacctgcacaggccaggcggccccgtcacccagagcacaaatcgtatggccttctatctgcttgctgatctcccacagggagtcgatctcggccggccgggcatcccccctcacgaaacgtgccatcaccttgttcatccagtccacacctgcagccacagccacaagagagggcctgatgatctccccagccaggatgtggggcggcgcttgagggctgcaggccacgtggtggggaggaggttaaatgaagccacagcaagcaagcccccaacctgcccgatgctcaccctcacggcatggggtacactggccacagctctcgtgcttatagaactcaatgaggcgggcgatggctttcacgatgtccgtctgggtgacgaggggcaattagcaggcacccacggccagacagaagcctgggcctcagccccctagcagcagcccctcccccagttccagaagctcttcccagcccacccagcgttctggcctcctccagcctccctgggccccctgtgctgcccagactccggggtattctcctcagagcagccttcctccctcctcttccaccttgctttatctcaggctgcaggaactgagacctgagtgctggcaagagggttttctgggaggcccagggagggagacagcaaccaggagggcagggaccagggctggtgtgtgaacccttaccgagcggtccatgacgatcaccgcagctgtgcccaggcctgtctgtgcctgcaccagcgcatcgaagtccatcagcaccgtctcacacacagacttggggatcagtggggtagacgagccgccagggatcacagcaaggaggttgtcccagccgcccgtgacaccccctggggccccaagtcggtccccaaagggatgcatggtcagggctggggccggcacacctgcctagtcctgagcccaggcccttagtcagcccctagacccagccccgtctcctgagccctcccgcccaggctctctttgtggacacctgcccccactgcgcacccccccaccacctggctggccccaggccttaccagcatgcttctcaatcagttctttcaagggcacagacatctcctcctccacagtgcaagggtggttgacatggccagagatgttgaatagtttggtgcctgagttgcgttctctgccaaagccagcaaaccaggtacctccacggcggcagattgtgggggacactgccactgtctccacgttggccacagttgtggggcagccaaacactccttcagggaaatgggaagagaactggtggctgctagggggtggggcaagtttcctggcagggaggtgtgtcccagggtcctgcacccatggcagagcccctgctctaatatccccttatcattcttatccctgctggaccccaaactccagagatgcccattgccttgttcaccccatgcccttagcctcagaacaggcactgtgaaggtggagccacagagcagcactggtgcggcggggaccgaggcaggaggagggacagcaggcggccctgggggagcctgtgtgttgttgccagcctactctctatctggccccagccgggaagccactcagaaatccctaagaacaatccaaagggagcctagccagatcccgggtgtcacaggacacagtctgacccagggttacgccaggccttacccacgtctgcggggaaggggggcttcaggcggggcttgccctgcttgccctcaatggactcgatgagcgctgtctcctctccacagatgtaggccccagccccgcgcaccacaaacacgtcaaaatcatagccagagccacaagcattcttgccaatcagacctgcctcataggcctctcggatggccacctgcaggacaaaggtgtgagtttcccagcccacccccagcccaggagtcagcctataacttcaggagtcatgaagcccttgaaggcctcccacggtgaagctcctaatgctcctggtataaaaaattttgctagcttagtaaaacgaattggaaaacttgactatgatctggaacagataagcaagaaggaacacataagtaagctgctttgctgccaggaaaataaaaacgaagtagctactatcaggtctcctaactaccctagtctgtaaaggaaaaataaaagtctttataaaattaaaataaaaatgtaattgcctatatccttattgccttaacctattttatttttctatatttcctacagatataagtattattcatagttccaagcaatgaacataatgtattttctccaaataggaattgtttatattcataattattccgctctcttgctaaacacatagttccacttaggttttttcttcttgctacttgttttataaaaaatactatatttttgaagcaaaaaaaaaaaatttacaccagcagcattaggagccctggaaggaggctttgggagccaagtcccatttgggatgcatgcaggactggccaccactcccccagttcaaccactgacagaccaggtactaacacctcagaacaactgtgctgggtgaggggtgtgtgagtgcacactgaacaccttctcatctgtctacatctctccctacccacctgcagattggaggcctcattgtagaattcccctcggatgtagatataggcagcgcgggcgcccatggcccggccccccaccaggcagccttccagcagcttgtgaggatcatggcgtaagatctcccggtccttgcaggtgcccggctccccctcgtctgcgttcaccaccagatacttgggcctgcaggggcccacaggtcagacaggctacagggccatcaggactgggtcttcaactccatgccaccccactccacccagggaggcctcaaagatgtctcctctgacagccaatcctttactgccctcccaacatgtcccaggggctctgcttgctcaccaccaatgacagggagctcactgcctattctgtctttgggtggctatgaccacaagaaaggtcttcattcagctcatccaaacatctctccttgtgtctgcccctgagagccagattctactcttggtgacaaagagcattcctcaagctctaccatcaaaaggaggtaaagcaggtgacatttatcatttgctttatgtgccaaccagcatacaggccaaaagctgtatgaacattatctctttaatccttgcatgatatcactgtacctatttacaaaaaggaagctaaggttcacaaaggctgggaaattgcccaaacctctatgattaggaggcagagctaggatttgaactaagtctgcctgagtcaaaatcatgtgttgattctgctacataagtctcccctgtggaagtccacagagtaagtcccatccatttaaggcctgggaacatgtgcccacctcattcatgctaagtttctaaggaaagagcccaaaggcccagggaaaccccagccacccccaaggtctctcccacagccacatctgccccgcccccacacacacacctgccatctgagggcttattcatgaagctccacttgaggccagtggggaagccagcgcctccacggcccctcaaacccgatgtcttgatctcgcccaggatccagtcgggccccttcagcaggatctcctttgtcttgtaccagtcacctcgactcagggaacctttcagcctggacagaatagggaaggcaatgaaggggacaccttgctccgggacccaacacactaagggcactgtctcacctccagtcatggcggccgtacaggttggtgaaaatccggtcttcatccttcagcgagccaaatgaggttttcttgggtgctgtctagggagacaaagggtcaggaggcccagagtgctctggggccatgagggattgggccagaagctacagaatcttgggtctccctatttaggaggggctgggctagggctagggaagcatctatagcatcatagataccactgccacttagtaagcattttttttttttttgagacagactcttgctcttttgcctaggctggagtgcagtggcgtaatctcagctcactgcaaactccacctcccaggttcaaataattcttgtgcctcagcctctggatagctgggattacaggcactcaccaccacgcccgggtaatttttgcacttttagtagagacagggtttcaccatattggccaggctggtctcgaactcctgacctcaagcgatccgcccgcctcagcctcccaaagtgctgggattacaggcgtgagccaccgcgcccggccattagtaagcattttgtttagcaggtactggatggaagcattttacatccaaaatcccatttcatcctcataagaactctgataggaacgattttctctgtttcacagaggagaaaactgaggcttggagcaaaaggagcttatggaaggtctcacagtcaaaagcagcaggtccaatttgagcccaggtctgtcggtggccaaacccacagctgcatcacggcaccacacagccccacaagccgagtgtggcggcttggccctttcccggcctggctcccctgctggaccaaaacttgggtaggccaggggccttttatattcctacctcggccgaagaggcgaaatgtgtttactgatgggaaagaaatgcctccttaacacacaggtgatggaggggctcacttaggatgaaatgaggagccccacgacccagtggagagcgcaccagctgagggcgacgggattcccatccttttaagagcacttttcagccacttcagggcgcagagcagtggacgggaaatcaggaggtgcgcatccctaaatggggcaatgaccccttcacgccctacaaggctgtgacaaggagagaatgaaagactaggggtcttcacaacctgcaaaacttccgccaggccgaggactgtaaaacaagggaagccagcaagtcagagggtcaagggagtcggccccgcgttgggacccgttcccctacttcaaccaggccggagcgggggccttcccgcctggcctggggagaagggctctccagaggccactacagaccccagggactgctcgtgcacgggcgcggccgcgacacccggccccaaacacccgtggccccagccaggctgggcctcaccgtgtcgccgctgaaacgcacagatacccgcgcgggaagcgaccagccgagcagccgccgtgttgccagcatcgcggcgggccagatgggtcacctcacgctgtcaccttcatagcactgaggctgaggaactggcgcgatagagacgctaggtggcgcgcaggaaagacgtcacgcgcccgacgccagcgccgcgcaccggtatcgctgcgccccttcaacttcgccagcggccccgcctcctcgggggaggactgagaggccagtgccttggcgccggggcttctgggagatgtggtcccaccggcctggggtccgccttcctccctccaccgggctggcatttagcggtggctgtccccaccgctcgctctttcgctccctccttagcccgccggctcccagcctttgatgccacaagtaaacaaac

SEQ ID NO: 97647 - DNA, 18201 bp, Homo sapiens
  misc_feature (1)...(18201): n = A,T,C or G
acctcttatttctcattgagcctcaggctatactccagctggccaaggctggaaacctgtctccctcaggctcaccttcctaaggaaaatgtcatagtaggtgctgctggcccctggtgatccagcttctctgccaatcatgacctgttccttcctgaagtcctgggcatgcatctgggacccccgtggagctgacaagttttccttgctttcctgatactctttggcgctgacttggaattctaagagccttggacccgagtgtgtggctagggttgccctggctggggcccggtgccgagactcccaagcggctctgtgcagaagagctgccaggcagtgtcttagatgtgagacggaggccatggcgagaatccagctttgacctttattcaagagaccagatgggttgccccaggatccggctgccagccctgaggccaagcacggctggagacccacgacctggcctgccgttgccctgagctgcagcctcggccccaggatcctgctcacagtcaccgcaggtgcaggcaggaagcagccctgggggactggacgctgctattgattcattaaaaaaagaaaagaaaaatacaccaaggctccatgttccccgtgacaggtgggcctgaggggtcggggtgacccccccccagcatggcagcatgatttctgtacaatcaatccatcatctggggcacagggtggtgtgcgggggctatttcttggctttggcggaattgcggggtggggtgatgggtcggcctccagggttcaggccactgaactgcccgtacttccccttgttcttgtcggcgggcttgaggatctaaaagagacagtgttggtcaggctcatggggctgagccacagggcctagcggctcctttcttccccacactcacctggaaagagcacatgagggtctcgtccacactcatcatggcgccagcattgtcaaactcgccacagtagttgggagctgagaaaagtgtcaccagctgccgcttggcaaagaactcgtagccgtcttctaccacctgggcgaggatgggagcagtcagtcccgagcgcaggcacggccctccccttcccctgccgcaggccggagccaccagcccacctggtgtgctcggcagatgaggtccaagtcgtgcttgtggaggaacttggccaccacctcggctccaaaggtaaaagagacgccacggtcgttctcgccccagccctgcacgtccttgtcagggtcagaccacagcaggtcacacagcaggccctggtcaggcacatctgtgggccgcatgatccgccgaatctgctccatagactgcaggtccggggacaggcctggggggccgggggaaggtcacttcctcaaacaaggacatcctccctccaggaagccttggccaatgaaccccacctttcccaccaccctcctggtcccgccactggtctcctgggcgcctagacaggcagaagtcatccccttcccctcagctttttcaagttcccaaacaggcacaaaggcatccctgccctcaggagcacagagctcccgggagaaaggagacaagcccactccatgtaggacacacatcaaggaagtgagtgcagcccagcacagtggggtatgggggacacttcctggaaggagtgacttcccagatgagacctaaggagagctgccgggtgctgagggatgcggccagtgctcctcctccccagccatcccctccctcacctccgtggcagcagaagatcttttcgtccactatggccgcgatgggcaggcagttgaagcagtcagtgaaggttttccacagtttgatgttgtagcgtctcttgcctgcccagggggaggtggctgtgaggtgcctgcctaccccaccctcagccagggtccctgggctattcagccgtggctgggaggagagagtcaggcaccgatgcaaaccaccccccacccctgccacctgtcagccttccaggagcaattctagttactttttattttaattaaagaagacaggatctggccaggcgcagtggctaagacctgtaatcccagcactttgggaggccgaggcgggcggatcacctgaggtcagaagttcgagaccagcctgaccaacatggagaaacctcgtctctactaaaatacaaaaaaatcagccaggcgtggtggcgcatgcctgtaatcccagctacttgggaggctgaggcaggagaatcgcttgaacccaggagacggaggttgtggtgagccgagatcacaccattgcactctagcctgggcaacaagagtgaaactccgtctcaaaaaagtaaagaaacagggtcttgctctgtcacccaggctggagtgcagtggcaagatcatagctcactgtaacttggagcttctgggtccaagggatcttcccgcctcggcctcctgccagaagtaattctaaagcacccgagtccactggaaactaagttccaatctggaccagcctcagggttggcactcctcgcatgcccccacccatgagccgggccaagtccaggtctggtttatctcagcttctggacagcagagcccatctgcaaacatcctaagtgcttagtagcaaatgtagggggagtgtcaccaggcagggccctgggggaaagcactagaatccgggcagcccttcagtcagcaaccattccccagaccccatgccaggaggggcagggcaggcacgagaacggacctgggccccgccttcgtggagcgcacagtctatcaagtgtctgtcagatatcaggccaatgtgaaggtcccactgaatggcaaagagtgcggttcaggacccgggcagccccagacgctcagaccactcacactcatcgtagaaaccatagatgcggttgatgctggcacactcgtggttcccacggagcaggaagaagttctcggggtacttgatcttataggccagcagcaggcagatggtctccaaggactgcttgcccctgtccacatagtcccccagaaagaggtagttgctctcgggagggaaaccgccatactcaaatagtcgcagaaggtcgtagtactggccgtgtatgtcacctgtgacccagggaaccgggtaagctagatgcaaggtctagacctgaacccagggccaggactgcgctcaagggaggagggctccaggaactctgtggggtccagtgccacttttaggaaggcaaggggacctgggccgggggctcaccgcagatcttgaggggtgcctccagctccagaagaatgggctggctcagaaaaatctcccgggatttcaggcacagaccgcggatctcgttctctgtcagctgtacattcttgccaggccgcgagccctgcactggggcgcaatggggtgtcaggaccctggaccctgacaggaggagggtgggcgacacgggtggccccatggatacctccgggggcgcctaggcctcctcggcccctccttgcccacaggcagctgttgctgctgagcctcccgggaccgcggcctcaagcctcccaggggaagcccccagctaccctcagcgcctcgggaggcgactgtcgtgcgcagggggctgccaccaaaaacctcacagcgcaggaccccttcctggaccgggcttcccgggtttctccctcgccccaagagcccaggcaacccgtgcgcccccagcccgggagagggggggagctgctccgcgcgtcggagctggccccggacctctcaggcgcgtccgcgggggggcagctgcggccacggaacctcgctgcccgtccccgcccagtctaagctggccccgggggcccgccccgcgccactttccgggccgggcacggggccatggtccggcggactcgggcctccctcgccccgaccaagcttccagcaagcgcccgatgattgagtccaggttgagcttctcgctgttggacatggcggccccgccgcctccatcccatctgctcctggcccgcccctgcttcccgccctccggtagcctctttccggcctggctctccttccgcccgccccatttcccccctggcctgcggcctcctctcctagcttcccggggcctccccctcccctttccccgccctcttttcgcccccctttggatcttatggccgggggccnnnnnnnnnnnnnnnnnnnnnnnnnnnnnnnnnnnnnnnnnnnnnnnnnnnnnnnnnnnnnnnnnnnnnnnnnnnnnnnnnnnnnnnnnnnnnnnnnnnnnnnnnnnnnnnnnnnnnnnnnnnnnnnnnnnnnnnnnnnnncacaagatctagaaggagaaggagacctaagaaattctagacagatatacagtgtaacacatacagaacgatatgcaagggaggaaggaaagatgatagaaggagagaaaaaagagataaagaataaataaaaacagcagaggaaaagaaggcgaaaatagaaaaaaaaaagcataagaaagaaaaattattcaaaaaatgataaaaaatagaccaaaggaagacccaaaggagaggataaagaaagaataccgaagaacataagaaaaagtagaaaataaacacaaggacaaagaatacaacttgaagaaaataaaagacaagaagaaagaaaagtgaaaaaaaaaataataaatataaacaaagagaaaaggaaaagagagtagaagatagacccaaaaaaaaaaaacgaaaaaaggacagagaagaacaaagacgaaaaacagataaaaaaaaaaccaagacaaataaaaaagaaccaaaaaaagcataacaaacaaaaaaagagacaacccagaacaaaattgaagaacaaaaccagaaagagaaaaaaaaagaaaagagacagaaaaaaaaaacagtaaaagaaaaaaaaaaacacaggtgatcacaaaaaaggaagaaaccaagacggacaaataaaaaaaagacagaagatagagacacaccaaagccaacatggtgaaaccccatctctctaaaaatacaaaaagttagctgggcatgatgggagcctcctgtaatcccagctacttgggaggctgaggcaggagaatcgcttgaacctgggaagtggagcccaggcgacagtgcgagactgtctcaaaaaaaaaaaaaaaaaaaagaagagcagacgataaatgaaccttaattcttgttggaaccctgagttggtgctttacatgccagtaacctcagaactggaagtgggcctgccgtggtggctcaggcctgtaattccagcactttgggaggctaaggcgggatggtctcttgcgtccagcctgggcaacacagcgaaaccctgtctcaacaaaaaatacaaaaattagctgggcatggtggtgcgcgcctgcagtcccagctactgtggaggctgacgcaggaggatctcttgagaccaggaggtggaggttgcagtgagcccagatcgtgccattacactccagcctgggtgacagagcaagaccctgtctcaagaaacaaacatgaagtccaggcgcagtggctcatgcctgcaatcccagcactttgggaggctgaggtggatggatcacctgaggtcaagagtttgaccaatgtggcaaaaaccctgtctctactaaaaatacaaaaattagccgggcatggtggtgcttgtctgtagtccctgctacttggggggctgaggcaggagaatcacttgaatccgggaggtggaggttgcagtgagctgagaccgcgccactgcactccagcctgggcaacagagcgagactctgtctcaaaagaaacaaacaaaagaactggaggtggcccggcccctgcgtctaacagtcctgggccctccacaccagcacaggaactcaagcctgcagtcactggggccatggggaaggtgggaggagcccacagctcaggggcactggggcaggcaggaagagcctcagagaggaaggggtgacaccccccacccttgggaggggcccccagcggttgccaaagctgtgtgaggaggaggaggaagtgagaggaggaggtgaggtgctgcgggaggtgagctgggctggtggggacaggggcagggcttggggctgggtctccggacagaggcctggcttttctgtcagggcagggcctagcccctgcccccataaaagaggagacatagggggcttggtgagataccctgaaacctcccccctctgaccccgcagccaggccccaggctggccgggagtggcccctcacactggttctccccactttctctgcctgtggcatcgaaggccccgggcaccatggcccaggccctgggggaggacctggtgcagcctcccgagctgcaggatgactccagctcyttggggtccgactcagagctcagcgggcctggcccatatcgccaggccgaccgctatggattcattgggggcagctcagcagagccagggtaagggggcagggtgagggctggcggaatgctgggacagaggacagggggctgagggctgaattctggagggaggccgggagggtctggtggtagggattgggagggggactcagccagtagcacccctctgcaggtgccaggtggaaccctaaggtgggaagggtccggggaggcctctgtacgtctcttacccccagcctccgagggtttgcacccactactggggcagaacatccttcccctttgaacctctggctcaggaatcccagatccaaatcacagaacccatacctcctccttccccctttccccaagctacagacagaaacacaagtccagatatagacagaaacttgccccaggtcacacagatcagacacagacccagactcaaactcaggactctgggcttccagtccagggctctctccagccagcttcccctatgaattgtctgtgtccctgtcctgggtgacagccaaccagtccctcccccaatacacacccactcaccccttcagtctcctgcttctgcccacgtcggagccacatcctttcctgtcccygtgacaagcattggcagctcctgggtcacaggtcaccccacagggctcccagagatccctagggccaggagctgggttcacctgggtagcctggagggtggcagtgtgggccttgggtaacagctgcccagcgtctggatacctgtgccatgcacccccaggccgggccacccacctgcagacctcatccgccaacgggagatgaagtgggtggagatgacctcgcactgggagaaaaccatgtcccggcggtacaagaaggkgaggggggcaggggccccacttggcttccatggctcattcctctctgcctcagcccacatcttggcaaaatgtacccaccctgtgtcccagcacctccggcctttgctccctgccacccaaagtgggcccctgcctgctgatgagctgtgcctggggcctgccagcaggagctatggaggctgcctagtggagcccttggcctcacccacaggtaaagatgcagtgccggaaaggcatcccgtctgccctgcgygcccgatgctggcccctgttgtgtggggcccatgtgtgccagaagaacagccctggcacctatcaggtgagggagtgggcaggggccccaattcccctacccagagcccctcaccacactgaaccctcacacccaccttcctggctacccacaggagctggcagaggcccctggagacccacagtggatggagaccattggcagggacctgcaccgtcaattccctctgcacgagatgtttgtgtcgcctcagggccacgggtacgaggccggtgatgcccagggacccccagccccacaagccccaggtgctccagcccactttcccyagcccagctctacagtcttgcatctcaggggacccaggaaggcccagggaggctgaggcctgggcagaggcccccagagggtggagaagggggtgcctgcaggactggccccttatggggtcttccggcacaggcagcaggggctcctgcaggtgctcaaggcctacaccctgtatcgaccggagcagggctactgccaggcccaggggcccgtggctgctgtgctgctcatgcacctgcccccagaggtgagtgaccttgaccctgctctgggaaccctagtgacctaggcccagggaaccccatccccaggaactgtggcctcagaaacctgcaatccttgattcctggaccctgtcctagtgacccaggtcctcatgactgccagcctcagtgaccttcaagcctaatgaccttgactccaggaacctgggacccttgaccccagccttgaccccagtcatctaggaatctggatgttatcaccttgaccccacgactcctgattctgaacttggggactgcgaccccaaccccaaagacccagaaacccaggacttgaactttgggacactcccaacccttggccagtgaaccccaaccctgtgaccttcaaatctaacaccatgagccctgtgatttccaacaccctaaacccctcagcagaccctgtcttgggcagaggagggggcttttgggaagggcttccaggaactgcgcaggttaggagtggccctgagtgcaggcccctgtggtgcccaggccctccccttcactcctttcccctgtcctgccttctcctccacggtcccttccttggtgagcacttacaggcctgtgccctgccccttccccaggaggccttctggtgcctggtgcagatctgtgaggtctacctccctgggtactacgggccccacatggtgagaggctgacatgggggctggaggaaggaggggcaggggcccggtgagtgggtgggggtctggggactgagggaggttgagcctgggctctgggggtggcggtgctggcctgctgatggacgtggccacaggaggctgtgcggctggacgccgaggtgttcatggccctgctgcggcggctgcttccgcacgtgcacaagcacctgcagcaggtgggcgtcggacccctgctgtacctgcccgagtggttcctgtgcctcttcgcccgctccctgcccttccccacagtgctgcgtgtctgggatgccttcctcagtgagggtgagtggggcagccagtggctggggcaggagccttggggtgtgggtggggaggtagctcaccagctccagggttccctttttgagcctcaartcacaggactgggtgtrccgaaggtgatggcctggtgcctggcgctacatcacccatcacccatcacccaggcaccgcctggtgcagagctgggccagggaggcttccagaggaggcagatggggcaggagcagggtgatcacagcacatggaggcctgagcttctcagggacagtaggaggcgttcctccccagagcccgcaggcacctgctgggtgctcactggctccagacgtggatctgcagctgggaatcaagtgatcgagaccttcaattctggcgggggtggggatgggtggcgacagtaaccaaattcacaagatatttatagattgtcagaagtgtcatgaagaaaataaaacaagggatgtgacagggagtgtcaggggagtgcaggggcgatggctgcatttaagctccttctggctgctctgtgcaggaggaggactcacaggggtggctgtggaggcctggggccagagaggccactgtccccaggggccaggctacagtctacgaagcagggagggcttggagccatgaagccagagaggtggaggctgggggccaggccaagaacaggaggggagtcggagcagagccaagctggactccctgtgtctttgggactctgccttgatactgccatcggtaacccacctgcattctgttctatatgtgaggtctggaggttgcaccttaaaacgtggtagaaatcagtcagcatatgcatactgtgcatactgaatgcctgtcgtgtgctcagccggcttcctgccctccgcacagcggaggaccactggctgacttagagttctggccacaggtgtccaagtcgctatccatgcggtcaccttccaaccagccttagacctcgagagcagggctgggcagagctgggcagggcctgacctgcccacctgggggcaaacactacacaggctccctttatcagaaggacgatagtatgaatagtgattgttcctaccatcatcactcaacctcgctggtcccctggtggctcttctcagatcagaggctgccaggaaggaattttgaggctccaggactagcccaaactcacactgtggggagtgtgcactgagtgctatgctcctggcttagggaagagcagttctgcctaggatctttctagaatcagagggtcacagatccaagttggaaaggcccttaaagggctccacctgacctttcatcatggagatgagcaagctgaggcccagggagggcttggtgtgaaggcatcagtagccctgggctcctggcaggaagctggtggcttggaggggactggagccttggggtgtggacagggagctagctcaccagctccagggttcccttttggagcctcgagtcatgggaccaggtgtgctgaaggtgatggccctgtgcctggtggcacatcacctgtcacccggatgctgcctggggtaggagctgggtgatcatagcacatggaggcctgactggctcagggagggtaggaggtgctcctccccggagcccacaggcacctgctgggtgcttgctggctccagatatggatggcatctgagcatcaagtgatcaagaccttcattttggcgggggtggggatgggagrcgacagtaaccaaattcacaagatagtaactcttccccaaagcatctgtggctcttgaggctaacttggccagtacagcggcctgtgttacccgaaatgcaactccaccctctgtcattgttcctgaaccggggagggcagagctgcaggagagtgggaggcatatggctgagggcaggtttgggtgcagaactgtggaggggcagggccggcctcccagtgaataagcccccggcctgcaggtgccagagtactgttccgtgtggggctgacactggtgcgcctggcgctgggcactgcagagcagcgaggggcctgccctggcctcctggagacactgggagcccttcgagccatcccccccgcgcagctgcaggaggaggccttcatgtcacaggtgggtacccccacctctccttggacttgcccagcccctgctgcacgggggaaactgagtcccagagcaggaagccaaagcgagaatggggacttagttcctgtcccctgagcttcagagaacacaaaaacstgaggcctccagtggctttctgtggctccccagtgaggctgtcagcccctcagtcctcagccacttcctgggctggggacctcacagtttcctgttcctgccttgaggccgggcaaacgcagcaccaactgctccccacaggtgcacagcgtggtgctgtcagagcgggacctgcagcgggagatcaaggcccagctggcccagctgcccgattccgcgccgggacccccgccccggccacaggtccgcctcgccggggcccaagccatctttgaggcccagcagctggcaggagtgcgacgaggcgccaagcctgaggtgcctcggattgtggtgcagcccccggaggagcccagaccaccgcggcggaaaccccagacccgcggcaagactttccatgggctcctgactcgggcccggggcccccccatcgaggggccccccaggccccaacgaggctccacctccttcctggacacccgcttctgagaggaccatggacttagtgtcccccagtctcaattgcctgatggctgatgccagcccggcaaataggcaccgcactttactcttgggactcggggacttggcttccttcctggcaaggaccaggcagtggggaaggaggaggtcctccgtggtacatactgggtcaggcactagcatggaggagggtcacagagtggggcacgtgaggacccatggaaccgtcctggtgcccaggccctcacaagyaccaaagccagcaccaaaggagtcagggaaggggttggctgagtcaagggaccccagagggcaccaggaataaaatcttcttgaacagatgccttggatggcgctggatcaaatgccctcctcccaaccccagacaggcagccccttcccctcctccctcatctgcccttcccagccccgccctctcctggtcctgccctggggacacaccgaggctgcccactggccgctggggaaggtgtttacagtaataagagccaattgaaagttgccctgcccagcctctggggacaggagtggcttttgcacctgcaggaggagggcgccccagtggatggcgagtccaggggctctaccccctcttctgccctccttcccctccctccagggtggttcagtactcgctgggatgggggactctaacccaagtcctccccgcacccatggttctagtcacatctgtcaaagggatccaggcaagaacaaaggcctagtgtgcctcggacaaaggagaaaggtcccgccagccctcacccctccctgggccctgcgtctgccccctcgggaccgccaccatggaaaccccctcccacactcactaatagcccccgtgggtgcccaggacctgagccatcgccagggcaacagggctggttccgacacaggcgtgtgtcccgcagtgtccattcccaagtgccctcccttcgatggggaacacggcaggactccatatggatgggaggcatctgcaggcccaggctccaggggtggccattgggtggggtgtcagtggagtcacctgtcagactctgggtttggaatgttcttgcgacagggccacaggctgcgtctatgtggcaagtgccaggtcctgggtcctgggcagacttgtcctactcccaaggagcctaacccctggaagagggaatcatggcggcccagacccttccttatctgtcgtttctccgggggaaactgaggctcaggaggagcaggaacttgcagaaagccttactatctatccatagcagacccaaggtttagccctgccccaaccactggcagctcccccctgggcagccccctgggagtgctttctcctgctccttccccgctctacccccaatcctgcaccagcccctcagtgtgtgaatgaggcaatagccagactcccgtgatttagagcgcgctccagagcctcctctgcccactcctccttaccccgctggggtgcctgcaacttaataatagcctccttacctgtagtttacaaaaccctttcccagaccccccgcccctaggccctctctctgcaggtggcccctgatatccctgttagagacacaggcttagtgaggacaaggacctcacccaggcccacagtgaaaggcagagccggctggaatgcagaggcaaggctctgtgctgtgtagactatgccttatccttagacgaggagtgtcttggtggaatctcaggcactgtagcgggcagggtggccggggtcagggggcacttgtccctgaaatccacttgggagctccccgccctccacagttcagctctttgcctgggagaatagaggagcaaggtgcagcagcctcagccctgggccgagggtctgtcatgagcctgcgggggcgcggtggcagtggctcaccctggacacagaccctaggagccggtggtctccagcagcgtccctccagctggggctcagtcattgcctttcctactcaggagactgttttctgggcagctcttctgtaggtttccttatcagtcacctgcatgggagccctaactcacaggctggacagaagaggcccagtgccctccgggtgtgaaccctcgcacacatgcgttctcacaggctctcctccgcagggctgcaccggcccccacagcacctttttgccagctagggaaagacgtctctcctccaggcaacatgcagcctcaccagagtgcacggtgtagcagagtggggtgtgatctctctcccaggtgcctttgtgcagtgagcaacctacacaaacatgctcagtgaacctagaaagtccctacagatctgcctggaagggggctcagagaagggaagtgatgcatctgagaggactcagtgtgtggggactgaagctgggagggcccctgggatgtctgtcagcctgcctcagagtggacacgagtgggggcatgcaaaggagtggagcaggacaaatgggtgcctgccatggatcggcggggaggacccacggtctccatcttgccctgccacccacttgaggttccctgaattcccacactgttccaggctcccagaggggtcagacttggactcacctgcatgggaaaggccctttcttctcctctgagcctcagtattctcctgcggataatgggattataatagcccccaccccagcctcaagagggctctaccagctcatgatgatgatgatgatgactgttcagtccagcgggacagcagccaaagcactgcctctcctcaccccacccctacctagcctcaggtgatgtccaggctttcctggcaggggcagagcagaaccacccgcccacctgcctgccccaagtcccaggatcctgagcttgggctgcagctgcccaactctgattttcctccctgtatccacaaggcaaaagccagagcagccagggaccagacagggtggcctaggagagggcacagccgcagcactctgtgcatgcatgcacgcattctggcagaagatcccggctctgcctctcaccagctgtgtgaccttgggcaagtcacacgacctctctcagtctcataattgctcccttgcatgtgaagtgttaagcctgggctgagtgtgcactgtatccccatttgaagatgagaaaactgagtccccagggctgcagagcttgttaaatgttaaatgtcaaagctcatgctctttggatcacgcccaggccccacagtgggaccccatgggcgctcaggccacccaggtggcaagcgattgggtctcctggggtggttgtgggacctgggcccctccccttagtgatctgaagctcactctccccagcctagaatggggctggttcctcattcctggagcctggaccagctgtagggagggctgcacgtgggcctggaagttgtgtggggaatgtgggctggactgggcatcctggagaagccatttcccctctctgccgaccctctccagtggtagacagggatgggtctgcacagactgccctgtatatagttgcagaaagggtccaacagctgtcatctctgtccctgacatgtgtgggcccctcagtattctcccccaggccaggaggctctcaaggacagccagggctcaatatgtgtccagttgcgagacaggcagggagaagggctgactggggactgtgagagggaggagttagagccataggctgccctgcctaggagagggaaaccagccccattctaggctggggagagtgagcttcagatcacaaaggggaggggcccaggtcccacagccagagctaggattgaaacccactggtgggacacactccaggagagggggtgaatctctggttgtgcttctgtgggtgaattgtggctgagacccaggtctcctggggtatgcttctgtggttgggtgggtacacttgggtgtgagtatgtatgtcttggggagattatagcttcaactccgggtgtgaagttgacctgggtgggtgttgataagcagagcagatttcttttcctttcttttctcttcttttttctttctttttttttttttttaaagagataggggggccaggtgcagtggctcacacctgtaatcctagcactttgggaggccaaggtgaccagatcatgaggtcaggagattgcgaccatcctggccaacatcatgaaaccccgtctccactaaaaatacaaaaattagctgggtgggctgggcgcggtagctcatgcctgtaatcctaatactttgggaggctgaggcgggcagatcacctgaggtcgggagttcgagactagcctgaccaacatggagaaaccctgtctctactaaaaatacaaaattagctgtcatggtggcgcatgcctataatcccagctactccagcctgggcaacaagagcgaaactccatctcaaaaacaaaacaaaacaaaacaaaacaaaagtagctgggcatggtggctcgcacctgtagtcccagctacttgggaggctgaggcaggagaatcactggacccggggaggcggaggttgcagtgagccaagattgtgccactgcactccagcctggtgacagagtaagactctgtcttaaaaaaaaaaaaaaaaaaaaaagggatagggtcaaaaaaaaaaaaaaaaaaaagagagagagatagggtctcggctgggtacagtggcttacacctgtattctcaggacattgggaggccgaagcaggaggagcacctgaggtcaggagttcaagacaagcctggccaacacggcgaaaccctgtctctactaaacacacaaaaattagccaggcgtggtggcgtgtgcctgtaatcccagccactcaggaggctgaggcaggagaatcacttgaacctgggaggtagaggttgcagtgagctgagatcacaccactgcactccagcctgggccgacacactgaaactctgtctcaaaaaaaaaaaaaaaaaaaaaaaaagcggagcgagcgagagagataggctctcactgtattgcccaggctggagtgcagtggcacaaccaggactcactgcagtctcgacccccggggctcatgtgatcttcccacctcagcctcccaagtagctgggattacaggcccacaccacctcaaccagctagtttaaattttttttttttgtagagacagggtcttgctatgttgcccaggctggtcacaaactcctgggttcaagcaattctcctgcctcaggctcccaaagtgctgggattataggcagccaccgcaccaggagaggctggatcttatagacatcctggcccctgtgtgcaagtccactgggtccagaagtgaggagggggctgcacagatgtgtggagaccctggcccaggagggcctctctgggagaacgtgcaatagggcaaagcgctggcagctgggacagaaagctgcagggctgggacctccggcctccatccaaaggtagggctcagggctgtgtgctccaggctgctctcccgggcaccccacccctaagggcgggccctagtaccagtctctgcctgctccggctctccccgcccctcctttccatctcttctccatggtgggcctccctctttcttcatggcagccctacgtctgtgaccctcgacgacagtccctgtccatctgtacctggccctctgtcgggacttcctctgtgtctctgaagacccccgtctctccctgcctgctccgtgccctcctcctgctgggtccgtgtcccgccacacgcccccaggtctgggacgttttcgtggctgacgggcgggggggggggggggcgcgtccccggcgggtccctatcggtccctgtcggtccgtccgccccgcgccgcccccgctgggcactgggcatgccccaggcgtttctatataaagcggcgccgcttgggccgggcgctgtgccactgccaccgccgccgccgctgcatcccgcccggtccgaatccgcccgccacgcccgccgagccgctgccgccgccaggtaccccagctccggccccgccccgagggagagccagggaggggggcggccggggcaggagtcgcggggacgaggaccccgggcgcccgctccccgcggcgggaccctcgacgctacgccccccacccccgggacccggtgcccccaactcccccccgcgctggaggggcagagccaagcccggaccccagggcaggaaggacctgtgagccgcactggggcaggagccactcggtctgggcagcagaaatccctccctaccttcggggtgggggtggggctgccttggcctctctctgcagggacaggtgtcggccacctctccact

SEQ ID NO: 97648 - DNA, 58398 bp, Homo sapiens
cctctgctccagccacactggcctccttgctgattcttaaacttaccaagcaagtcccacctcagggcctttgcacttgctgttctcccagctcagaaggctcttcccccagaactctatatagctcccacctcatgatcaggtctttgctcaaatgtcatcttctcaataagcccttccatgaccacactatttaaaattacaactccccctccctccccacaaaataaatcactcccatccttattccctgggttccatttctgcagagcacttagcataatctaatggattgcatatttcacttatgtttcttgtgtataatctgtctgcccaactagagtgtaagttccatgagggcaggtgagggatctctatctgtcttggtcactgctgtatccccagtgcctacaacagtgccaggcatatgttcaccactctgtgaatatttgttggtataaatggaaggaatgaatggattaatgggtgcatatattgttggaagaatagatccaagggaaaggaaagaggagggtaacaggaaaagagcccaactcaccctaaaaacatgaaggcttccatttgccaaaggcagaagatacttaaaaaaaaaaatcttatctccacaaccagatgatcaaccaactaatcaatcactctccaaaccatgtccctcttgcctcctaaacatttcttgtttcttccaacattttattatgagcaattgcaggcatgcagaaaagttgaaggattttacaatgaacacctttaccccaatcacctagactccactctaaacattttactatctttgcttaattatatttctatacatttatccatccctccatccatccctccatccctccattcttccatccacccattactccatccatccatccattactccatccattcatctctccttccatccattacaccacccatccatccatccatccatcacaccatccatccacccaaccatccatccatccatttatccatccctccatccatccctccatccattcatctctccatccatccattactccatccattcatccatccatccatccatccatccatccatccatccatccctccagcttaattttgatgcagttcagtgaaagttgcagacaccagtacactgccccctaagtccttcagagtgtctatcagtatttgtttaccattctttattttctattttgaagtaaagtttacatacaagatgtgcaaatctgaagtgtgccattcactgagttttgacaaattcatatacccgtataacgcaaacttctgtcaagataaagaagcactcccctgatgttttttccactatacatgagccttacttgttctggaatttcatttaagtgaaattgcataatacattctttactgtgtctagcttctttcgttcatcataaggtttttgagagtcatccatgatatatgtgtatcaatacttcatttttttttgttgctgatagtattcactgcatgggcataccacaatttgcttatccattctactaatgatgaacctcaatatctcttcaatccaccccctttccttcatctccatggccccttccctggcccaggcatctcttctttacacccaggtctccactccagcccagcctccttcttgctctctgatctctaatctcactccctgtcatccaccttccagaggattttgttttgttttgtttcgttttgttttgttttttaatacagggtctctgtcacccaggctggagtaaatggcaggatcatagctcactgcagcctcaacttcctggattcaatcaatcctcttccctgagcctcctgagtagctgagactacaggtgcatgccaccatgcccagctaatttttaaattttttaaagagatgggctctcactatgttgctcaggcttgtctcaaactcctggcctcaagcaatcctcctgccttggcctcccaaacctgggattacaagtgtgaactaccacacccagctcccagaggaatccttatcaggcacatgttgtgttctgtcctgctcaaaactcggccatggctccccagtgctccctggggaatgcccgagattctttaatggctttcagacttggtttgatctcaccccgatgcacccctccaccatcacttcccatctcctctctttataatccaggctgcaaccactgtctacctgtcagttccctcaatgtgccaagctctcttttgcctccaaactgttgtattatcttccctttgcctacaatacttttcccccagccctctcattcatgtatttatttattttacagatgaggtctcactctgttgcccagactggagtgcagtggcacaatcatagctcattgcagcctccagctcctgggctcaagcaatcctcccgtctcagcctcccaagtaactgggactataggtgcacatcaccatgcctggcaaagttaaaaaaaaaaattaagagatagaggccgggccgggcgcggtggctcacgcctgtaatcccagcactttgggaggccgaggcaggtggatcatgaggtcaggagatcgagaccatcctggctaacaaggtgaaaccccgtctctactaaaaatacaaaaaattagccgggcgtagtggcgggcgcctgtagtcccagctactcgggaggctgaggcaggagaatggcgtgaacccgggaagcggagcttgcagtgagccgagatttcgccactgcagtccgcagtccagcctgggcgacagagcgagactccgtctcaaaaaaaaaaaaaaaaaaaaaaaagagatagaggccgggtgcagtggctcatgcctctaatcccagctctttgggaggttgagatgggcggatcacctgaggtctggattttgagaccattttggccaacatggtgaaaccccatctctactaaaaatacaaaaattagccaggcgtgatgtcagatgcctgtaatcccagctactaaggaggccaaggcaggagaattgcttgaacctgggaggcagaggttgcagtgagccaaatcgcaccaatgaactccagcctaggcgacaagagcaacactcagtctcaaaaaataaataaatacatacataaataaaataaaaattaagagatgggatcttgctatgttgcccaggctggtctcaaactcctggcctcaaatgatcctcccccttcagcctcctgagtcattgagattacagttgagagccactgcactcggctgtccccaaccctctctctgcttgcctcactgttattccttcttaagtctgcatccaaatgccccttccacaataaacctttctgacagccccgacagggtgggtaaggtgcttccaccaagctcccacagttcctggcagttcagaccactctacaatttaatattaaaaggtcttaaattcccacttaacttcagttccaggtacaaaacttgtctcttcaaacaagaacatatcctttagcaaaaattggaaatcattttaacggacacatttcccttattgccttagctgctgggaacctctgagcgaagtttaacgctaacctacatcgtagagagacacctgttgcatctctgtgtgtaaagtgttagttctattttaatgtttgttgaaatagtgccagcttttcttgggcactgtaaatccctccgattggctctctgctgtgactccctcataccaaaatcaatgagttcttccactgaatctatcatccaactactgccccctccaaactcttccaacacacccactggaactctcgttgtcttgttaacaaccactccccttcctcagtttctcccttgaacatctcttctaccccatgtccttacctaaaccctaagaagctctaagaacaatgcttcctctgcagccccttctactatttatttatttatttatttagagacagagtcttactctgtcactcaggctggagtgcaatggcatgatcttggctcactgcaacctctgcctcctgggttcaagcgattctcctgcctcagcctcccgagtagctgggattacaagggtgtgccaccacacccggctaatttttgtatttttagtagagatggggtttcaccatgttggccaggctggtcttgaactcctgacctcaggtgatctgcccgcctcagcctcccaaagtgctgggattacagtcgtgagccaccatggccggcccccctttataattcagactgctccttttctaacatcccacctgcctctacactgagggttgaaagctgatttctctatcaagattcttttgggtgcaagtatctaaaatccattcaaacgaatctaagcacaaagcaaataaggcaatagtgaatgaagcaatatttgacaaaagcaacagcaaaaaaaaaaaaaaaaaaaaaaaaaaaagcccattgtgggtttcatttgaaaaatccaagaattaaactggagttcaggtatggctggatccaggcactcaagtgctggtgtcaaaactgcctttcacaatcgttcatttctgcacaatctcttttgcactgaacctcatctcataaagcctctcctctctttgtggcagtgtgagccccatctgctccatctgcccagcaattccagcagacatagaaaatcctctttcctaatggtttcagcaaatgtctcagggttgattctcattgggctaaattaggtaacatgccttccctgaaccaatcactgtggccagggaagcagactcaactgattagccaggtttggatcctatgtccatccctggagctggtgaaggcagagcagtggccaagccctattcaaattaaatagatgaagaggacagagaagtggtttcccaaaagaaaacagagtggggaactggcgtgagccggggagccgtgtggattcctggaggaagagtgtgctaagctgtgggaacagcaagtgcaaaggccctaaggtgagcaacttgcctggcaagttcaaggttcaacaaggccacttctgctgtagtatcctcttccctgccaaccaaatccagaatagtggtccaacacacacacacacacacacacacacacacacacacactctgttccttatccaactgtaatgctttcacccttgcttggtacctttgtacttctcccttcatagtcgactagttaaaaaaaaatacatttctcggctcttttttgaagtaggtgtgattgagttaaaacatatttacttgacataagcttaattattcatcaatgggaacctgaaaagggagtcagagaggccaagaggttagggtggagtagagggggtagggaaggtaagctggggtgcagagggtgcagactggaggaatgggggcgaagtggggtatgggactggggtggcagggaggggctggggagagagagagaagggtaggtgccagagggccaaggattgtggaactggggtggggttgggagttggggggtggggaggagatgtggggtactctgtgaataccttagaagggatagaggaggcagggctaggggtttggaaggggtgggattggaggtcagaggagctcaactggggttaggaaatggaaaggtgagaagaggtgggggttagaggctggggactggggtccagagagcagagtgaactgagtgggttcagaagagtactggcgttggcacttcagaggctggactagagaaggcgcgttcagccgacggtgcgggatacactgccgaggaagtccgcggcgaggggcgtggttggggggtgtgtattacacggtatcccccccttgcctttccaagtctttccctctggttccgcctccttttcaggagtgacataccgttgcccaatcagagcctcaggcctggcgtggcacagccaaccgcgcggcgtggggaggagctggggagggggctcgcaaggccggggagggggctaggggcctccgagggctccggagcggcgactggcgagccatggcgctggggctgcagcgcgcaaggtactgaagttcgggggcaggagttctgggaattggggggctctcctcctggagacccctgagctggattgttggggggggtggggttcgcgggtgcgagccaagaacgccccggggcgcgcagttggaggcacatccccaccgcactctccacccttagggactgcaggggtgggggattccctacgtctctggctgccccgcccctctggccaagagcggcttcggggttcccgatttctcgctacccaaggctcatttaccctcctggttrggggtggaacttgggattcctgataaattaggggtgattgcatttgagcagtccccaggcttctgcgggagatattcgccctccacatattgatccctctggcctctgaaccccccaaaattgagggtattctttgccaccaggtgcctgggatcctaggtgatatgggatacccctaaatggagccttcccacatatagggagtcccttggaatggcattcagctcctgagttcaagagaggagagatctcctctaatagtatgcttcctgacacagtctcctaaacattgggtttccctagaaatgggcagaggggagcccctttcagaagccgtctgggacccttcccaagagactttttgtatcctttcaaaagccagagtcacccccttaaataacagggaaacaagctggacccacttcccaaagtccagcccctcatctcacccctgcacccccatcctgagagacaggggagcctcatccaagctttattttggggagactccatggcagggtgctgtgagcctgcaggctgtgatgggaacgccccctgccgcagtactcagatggggtcatcccgggcagagggtgggtttctgggttcacttgcccagcaggtgcagctctgctggaacacaggggaacctgtgccctggggccgctgccggggggttttatctggccatgttcccatgggaccctggaaaatgttctaggtcctcagctttccctgtccaatgtgaggcacccagtaagcctcacccccttccctcctccctggcttctcaggcctgattggatccgtgcacaccccatgtttctaaccccccccatcctctcccctgtcccctactctattccaggccctggctctgggcctaacaaggaactctatcccaccccttttgggccagctgtcgttccgcccctctcagcgccccctcctggctgggtgggggcccctcttggctgagctcgggtgccccccctccccacccaaggccggccctttcctgtggagtcatctcaccgccgtgcgcacccactcgtaactcgcacccgggtcctggctgcaccgcatcccctcctgcaccccctggatggcccttcagccaacgggggcctgggcgatggtgagtgggcccccaacacctcctttcccccttcccttcctctagctggggctggctgccatcccactgtggccaaggatgctcttgggaagtccctggtgggtacggcttgcagcccagagtgcccagtgaggtagtattcccggagaagataggattttggggaccagcaccctaccagattaccatgtccttgagaacaggcagagtcggggggcagagagactcccccagacccccatgccaagtccctttgcaaacccaaaccctgcctctggtctctcaggacacctctctgcaatgccaaaaggcatccttgcccagctacaacctaaacccccacccaccaaatcctctgtgcttttcgtaagacgcccccccccaatacccagctgggtgtcagaatagaaaagcccagaagtagccctgaatgtgggcagggactgcctgcttttattatgccttcctcatgggtggcaaattcttcagggcagggaagaggtgaacttctctccttcctggttggaggggggcactgggccccaacccccattctcaggcctcaccctgagcccgccaggccctggccccaccccctgttcttggctggaacacggaggaagggtggcagggttccagctgcacgtcccaagctgggcagagtgccagggggctggaccagggctgggcatggggccagctggggcgatctggaggcagcaggggtgtgacgggggaagggaccgaggctgctaggcaaaagaggggtggggcaggggcctcttgggtgggggccacacctgccaagagcacaggccccaaagacagggttcaaatcccatctcacccacttcctggtggtgtggaattgtgtcagtgactgccgctctgagcctcactttcagatcctggaaatackggcaggccgggtgcggtggctcaggcctgttattccagcactttgggaggctgaggtgggcggattgcttgagttcaagaccagcctgggcaacatggcaaaatctcatctatactagaaataagcaaattagccaggcatggtggtgagtgtctgtagtcccagctactcaggaggctgaggtgggaggatggcttgagcctgaggcagaggttgtaatgagccaagatcaggccactgcactccagcctggacaacacagccggaccttgtcgcaaaaaaaaaaaaaaaatagaaaaatagaaaaaaaaaaaagaaaactgggtatcacactccctttccaccaccccagatcaagatgaggagccagtagtgaggaagcagacggtggggggcgggacacccaacaggtgtgccacaaactgagctcaagtcagagtagacagacctggcttgaatcctgtctctgctactaaaagctgtgtggcttcagtttcatcacctctttgggcctgcttcctcatccggaaaatggggaaagtcattgcaggaacatggtcggattcactgagaagtggttgaacatagttcagtgtcaatggagggcgctgggttacttgggctggggatgccattgctccaaatctcagtttctgcctctttaaaaggagagatcacttctcctgctcaatagggtagtagtaaggacttaatgggttctctagctccgtgagtgttcaacacaccaatgctatcattattacagtatcactgttatttaatcctccttttaagatgcttgtgtaaaaaccatgtatgtaattgcatgcacacaccacactatggggcgtgtagagtaatccacaggttactgtaaagcccaagaagctcctaagcccatgctttccatctctgatacgcacagagggagaacagtaagtctaaccttggccgggcgcggtggctcatgcctgtaatcccaacattttgggagtccgaggcagacagatcacctgaggtcaggagttcgagaccagcctggccaacatagtgaaaccctgtctctactaaaaatacaaaaattacccaggcatggtggcaggagcctgtaatcccagctactcaggaagctgaggcaggagaatcgcttgaaactgggaggcagaggtgacagtgagccaagatcaagccactgcactccagcctgggcaacagagcaagattacgttcacacagcttataagcagtcacacagcttgtaagtagtggagcttgtaagtagtagcttataagtagtggagttgataagtagtagagtcaggattggaaccctgagccagaggaactagcccccagtctgtgtaatgggaaagacccacacttcccagtagaacatccagagggcaggctgggagctggaaggagggtccctccgcagccaccagctggctccttctatggaagaagcagcccagccacagaggattacagagcccagctgcctgggaggtggggcactggccccacctccctgccagttcccactccctgttccctgtcgggcccccagctccgtgaggccctctcgcccccaccctctgggcaggaagacaaacagggctggaacagaacaggacggaatgtcctctcaggcaggcaggactgaggcccctgcccccaccagccaggaaggaggggacggggacaggggccgtatctcccctgctccaaccctccatccaaactgcccccttctgtgcctccctccctgctgtactgaggattttattttccttctgtctccagacaggaaaatatccccttgccctggggggtggggccgcaggtctcttgcctgaggctggggttgatgccaccccagaagcaccctctgctcttgaatttaagaagggacagtgtcccctcctagaggttctgcttccctcggatgggtcccaaggaggggatgagaaaaagcctgaagactggaaactcaccgcccagattcaaatcccagctcrgccagttgttggctttggggcttcttgggcaaggacttcacctttcagaagctgtttccccmctgtaaagtggaagtttaaaaygcccccctccgccgggcatggtggctcacgcctgtaatcccagcactttgggaggctgaggtgggcagatcacttgaggtcaagagttcgagagcagcctggccaacatagcgaaaccccgtctctactaaaaatacaaaaattagccgggcgtggtggcagatgtctgtaatcccagctactcgggaggctgaggcaggagaattgaacccggcaggcggaggctgcagtgagccaagatcgtgccattatactccagcctggctgacacagtgaaactccgtctcaaaaaaaaaaaaaaattaaaaattaaaaattaaaaaataaataaaaaatgaaatggctccctcctaggggtcccctgaggattggatgaatacatgtagaatatatagtacagtggcaagcacataaatgcttagcaaatgacagctgcctattactaatagtaatatttatcaatataaatgtagatgagactatatataccatatactacactagattatatatacaatatagtagatgtaacacatcatataataattttttattttgcctatttttgttaatttgttttttgtcttttttttgttttttatttgtttgttttgagacggagtctcactctgtcgcccaggctggagtataggggcgcgatcttggctcactgcaacctccacctcccaggttcaagcgattctcctgcctcagcctttcaagtagctaggactacaaggcgcccaccaccacgcccagctaattttttgtatttttagtagagacagggtttcaccatgttagccaggatggcctcgatctcctgacctcgtgatccgcccgcctcggcctcccaaagtgctgggattacaggcgtgagccactgcgcccggcctgttttttgtctttttttagagacggagccttgctgtgtcacccaggctggagtgcaggggcacaatcatggctcactgtaacctcaaacctgggttcaagtgatcctctgtctcaccctcccaaattatagccgcttccggctataattttgtatgaaagaggccaggcrtggtggcttacacctgtaatcccagaatttggggaggccaaggtgggaggatcacttgagttcaggagttcaagaccagcctgggcaacaaaatgacacactgtctctacaaaaaatacaaaaattagctgggcgtgctgatacgcacctgtggtcccagctacataagaggctgaggctggaggatggctttagcctaggatactgagkctgcagtgagccatattcatgccattgcactccagcctgggcaacagagcgacagcctgtctcaaaagaaaagaaagaaaagaaaagagaaactttgggttcagaaagacctggagtttgaatttgaagacagtggcagaaacagggagaagagctaaaattctggacataaatccaggcccatagagatagagaaaatttgagaatttaggtagaccattgtttaaaggcaggcttccctatttgtgggcaggcactgcacctctctgagcctcggtgtcctcatctgttcaatgggacgttatcaacttccttctgggtggcctgagcattaggcgggttaatataagtttcgcacttggcactgggagtgacaaaatagtaaaagctggataagtggcagatatttctgataaaacgacacttattcttccaaccccacatgcaaaatgtaggtatctgaagtggattacagggcagggtgagtggtaaacagaacaggttgctttgctgtgtcaccctggcgggtccctgcccctcttagggcccctgttggtggttcgtcgttagactttgagatctatgttccaagattcacaggacggctcagttgagggaaaagggcagaggaggtgattctgggaaactgcagggcagggggcctgggaggctgtaggcctctccttcgtgggccctccctcctctggcccctggccagctcagccagccccctcccagcaggggccctccctgtcccccaggcgtccctagcctgggaaataaactgcagataagtcagggaggggacagagcggccctaggcgcgccacagagaggagcgaggcgccagaggcaccatggactggcaagaccacaggtaaaatcagggctaggaagggctccacagtgtwgcccttccaggcccagggagcgccgcgaactcgacagggccacacatcgaggcctgcgcagccgcggcccagcactccacgagccccggccccacgtggcagctccccacgtgctcgtcccgtcctccttttctctttcccgagtcaccaccagtgaatgctgcccatgccctcaggtcgaccacggagctgcgcaaggaaaagtcccgggatgcggcccgcagccggcgcagccaggagaccgaggtgctgtaccagctggctcacacgctgcccttcgcccgcggcgtcagcgcccacctggacaaggcctctatcatgcgcctcaccatcagctacctgcgcatgcaccgcctctgcgccgcaggtgagccccgcccgcgggaattcccgtcttggtcaggccccgcccacggaaaaaaactacatcccagggaggcccctcctccgggaagccttattctgacaaagccccgccccctggtgtcgtttttttcggcggagccccacccccctggaatcgacttccccggggaggccccgccccctttgagttcctggcctgctgggagtcccgcccccctcgaagtctatcacttgtgaggccccgyccctggaacgcgccctttggaagccccgcctccttaggactcagaaaatccgctaacccttcaactcttacgatttggtcctctaggagactctcccagatggataggccctggtctctcataatatatccactgggaggctgcgccgcccaacttttcgttactgtatctgagagtcccttgtcccttccccacccctctagttctacatcacttgttctcttagtaggcatctccttgaatttctacccagttagaattgcatcctgcagcgggctttgccacgcacgtgcacgcgcgcgtgcacacacacacatacactcacacataaaccccgtggaatcccaggaccctgaaagcgggggaagtagcgttattctctgggaggctctgtccatttgacttccctgccccatagaattttacttttcttggaggctttacccccttagaagtctgttccctgggagtcccttcttctctagagttctgtccctctggaaggtcctgccctccatgagtttgaaccccttcgaggcttccccctcatctctatattacaattccccttaggccctggccccttcatattttgaccctggggagttccatccacttagaattctgtcctcctaggaggcccacccacatccttagaattctgttcccttgggagactcctacttccttagaattctgccaccctgggaggccctgcttctaattccagtgcttcttggtcctgctttcttccttgggaatccaggccactaggatgtacycccacttccttgggggtgcatgtaagtttctctgaatgaggaaaggcagagggaggctagcccagggtcagtccataattcagaccataactgactagagatgcccccatccccctgccccgggcaccaggggagtggaaccaggtgggagcagggggagaaccactggatgcctgctacctgaaggccctggagggcttcgtcatggtgctcaccgccgagggagacatggcttacctgtcggagaatgtcagcaaacacctgggcctcagtcaggtgagaggagctccttgctctgtgcctggccctgtactggtgatgctggggatacagtggtgaccaggacagccatagccctacctttatgggactcacaatacaaaggggatataggtatgtcactagacaggaagacccagaatggtcagggctgggatgggacagtctagggggctgtgagagcacaggggtggggtgtacctgacccagcctgagtgggaatggagggcttcctggaggagaagatatctgagctgaaatctgaagaacttagccggtcaaagggtatggagaatggatgggatcagtgaagatcaggaatgtacatggtagagggaacagaggaggcaaaggccaagaggtgaggaaaaaaaaacagaataatttggggaaataaagttggccacgtgcagtggctcacacctgtaatcccagcactttgagaggccaagatgggaggatagcttgagttcaggagttcagtgtttcacctgggcaacayggcaaaaccctgtctccaccaaaaatacaaaaaatttgccagatgtkgtggcacatgcctgtggtcccagctacttgggaggctgaggtgggaagatcaygtgagcctgggaggtggaagttgcagtgagccaagatygcaccagtacactccagcctgggtgacagagcaagacccagtcgcaaacaaacaaacaaaaaaataataaaaagtttatcctcctaggtgcagagtgcaataggagaagctgagagacaaaaggctagagaggtcatcagggtagactgtggccaaatttaaggccaaattatctttatctccagggccccggggagctatagaaggattttaagcagtggagaggttgtgccagaaaggtagaatcagatttacatttttgaaagatcctctaggtacggcatggaggtagatttggagggagtgagatcagaggttgaaagatcagcaatgggtagatgccaatctcaggtgggagaagaggaataggggcagggaccatggggatggaaagataggaacaagagacatttagaaagtagaacttacttttttaattaacatggaaggcttcatgcatttgcatatcatccttgtgcagaggccatgctaatcttctctgtattattccaatttttagcatacatgctgcctaagcaagcatagaaagtagaactaactttaattcatccttacagcaaggcctacaagaaagttcccattcttttttctatctcacataaataggctccatagttggtatctgttccttttctctgcctcgttaccccactcctggtaccaatttctctgttagtgtgagtgagctttttggacccagagagatgaatgtcccgaggttccaaagctaggaagtggcacagccaggatttgactccagctacaagagatgttgtcagaggagcgagatctccctctttccctattcaccagcaccagcaccattcacatggtgagccaatagggtccaccttcatctgtgtcccctcctcccagcaccacgctcatttcctaaattgaaatgaagaattgggttttctgcctgccagaaaagtgtgatttgaatggagtctcatctcggggccttgcgcttactattcccctctttctagaatactcttactccagggggccataaggccacctcacttgctttgttcagcagctttttaaatgtcacctcttcaaagaaactgtctagaccactctgtctaaagcagcctcccatcattgcgttaccttgtactgcttttgttttcttcatgttacttgttatattgttgttatttgttctttcattcactgtctgtctcaccccactggccagtaagctcttcaaggcagggatttgtgtgtgcagtcaccgtgtccataccatttagaagagccaggtgcagtagctcccacctgtaattccagtactttgggaggccaaggtgggaggatcacttgagctcaggagtttgagaccagcctgggcaacatggtgagacccccatytctacaaaaaaatttgtaaaaattagccaaaagctggatgcggtggctcacacctataatcccagcactttggaaggccaaagtaggcagatcacttgaggtcaggagttcgagaccaacctggccaacatggtgaaaccccgtctctactaaaaatacaaaaattagccgggtgtggtggcacatgtctgtagtcccagctactcgggaggctgaggtgggagaatcacttgaaccagggaggtggaggttgcagtgagctgagatcgcaccactacactccagcctgggcaacagagygagactccatctcaaaaaaaaaaaagaaaagaaaaaaatagccaggtgtrgtggcatgtgactgtagtcccagctactgaggaggctgaggtgggaggatcagatcgcttgagcccaggaggttraggctgcaggaagtcatgatcgcgccactgccccgctgcattccagcctgggcaacagagcaagacctgtctcaaaaaatagatagatagacagataggtagacagacagacagacagacagacagacagayagacagatagatdgatagatagatgagggcctggcacttggtatgcgctgaataaatgcttgctcagtgggtggatggatggatggatggacaaatggatggataaatgaatggggagactggtgaaatcatccaggctcatgaattggagcaggggaatgaggatgggatggaggagatgggtcagaagccctggtagacccccacccctctcatccctggcagctggagctcattggacacagcatctttgatttcatccacccctgtgaccaagaggagcttcaggacgccctgaccccccagcagagtgagttccctggaggcctctgtccccaccatacagaggaggaagctgaggctccacccctccctcagcatatccccacctcctgtggaacaccagactaagacaagtaggaagaggagagatggccctgccctggggtctatggggacaaagaccctgccctgggggggtctgaggggacacagccctgccctggggggtccraggggacacatactacccctgggggaccctctctggttccaggtcccarttgttgggatggagctggggaggcctgagcagccagggtgccggagggcactgggcctgtgtgtagctgcctgtgacctccccgctgcccccgggcctccccagccctgtccaggaggaaggtggaggcccccacggagcggtgcttctccttgcgcatgaagagtacrctcaccagccgcgggcgcaccctcaacctcaaggcggccacctggaaggtgcgtggggccgggccagaggagggcggggacgctggggctgggtgtgagccctgaaagatcttgaagggtgctggagtccaggcatctcctrggctggggaccctgcggggctcactcaggtcaggtctagcgggtctcagggcatcgaggagcatgggtgtctgtggagttgggacctggggctcctgtaagctctcttaggatgggttcctatgggcctggggctggggatcctcagtccctttgaacctgaagtcttcatggggttggaatctcagctccctgatgggccctcaggacrcatcttccaaccccatgggtggtctcaggcccagaggcaccactgccttgtcccctcatctcggcccccaggtgctgaactgctctggacatatgagggcctacaagccacctgcgcagacttctccagctgggagccctgactcagagcccccgctgcagtgcctggtgctcatctgcgaagccatcccccacccaggcagcctggagcccccactgggccgaggggccttcctcagccgccacagcctggacatgaagttcacctactgtgacgacaggtgggcaggggccccctcttccgtctgcccaagttcaagtgctgtttccctccccacctccacacycccgcatttctctctctccttctctctctctctctcacttcatccatctctctctctctttgtgtgcctgcctgtctctgaattttctacatgccttttatatcttttctttttttgtaaaatcgctgccttgccatttgcccagactgctctcaaactcctgggctcaagccatcctcccacttcggcctcccaaagtgttgggattacaggtgtgagccaccrcacctggcctccttttatctttcattctctttctgtctctgagtctttctcttagtgtytgtctctctttgtcccttttcttaaatgagtcaatttgtgtcaagcagttaatatggtgcccagcacacaggaagcattcaataaattgtcgataggccaggcacagtggctcacaccggcagtaccagcacttagggaggccgatgcgggagaattgcttgagaccaggagttcaagaccagcttggacaacatagggagaccccgtctctacaaaaaaattagccaagtggggccgggtgcagtggctcatacctgtaatcccagcactttgggaggccaaggtgggtggatcacctgacgtcaggagttcaagaccagcctggccaacatggtgaaaccccaactctactaaaaatacaaaaattagytgggcrtggtggcgcatgcctaaaatcccagctactcgagaggctgagactggagaattgcttgagcccgggaggcggaggttgcagtgagccgagattgcaccattgcactccagcctaggcaacagaacaagactccgtctcgaaaaagaaaaaaaagaaaaaatttgtcaggcgggtggcatattcctttagtcccagctacgcaggaggctgaagtgggaggaataattgagcccaggaggttgaggctgcagttagccatgattgcaccattgcactccagcctgggcaacagaatgagacactgtctctcaaaaaataataataataaataaaataaactgttattatttgttcaccctctatccttcctttcatctctttttctctccccctctcttccttctgtccttctcttccttcttctgtcttatccctcgccctggtgtcatgcttaggaatggtgactctggattcagcctgcttgagtgtcagtcttggctgtgtatccttagccaaatgacttcacctctctgtgccacaatttcctcacctatactgtggaatcataacagaacctgccttgtacagtcgttctgagcagctcagtgagtttcccggtgcaaagcacaagtatctaatttttaaatcattattgtcatcattactttttgttgttgttgttgaggtggagtcttgctctgtcacccaggctggagtgcagtggcaggatcttggcccactgcaacgtccacctcccgggttcaagtgattcacctgcctcagcctcccgagtagctgggatcacaggggcctgccaccatgcctggctactttttgtatttttagtagagatggggttttaccatgttggtcagtctagtcttgaactcctgacctcaggtgatcggcccgcctcggcctcccaaagtgctgggattacaggcgtgagccaccgcacccggcctatcatcctcattactttttatttattttcattcttctctttctttttgtgtttttttcttcccctctcttcctctctcctatgtcatgcatgctgtctctttttctgtcttttcttagctcttcttcccctctccaccccttctcttcccttgtattagttccctgttgctgctgtaatatattaccacgaactcagtggctccaaacaacacaaactcactgtcttaccgttctggaggtcagaaatttgaaatgaggccaggcattgtggctcacgcctataaacctagcactttgggaggccaaggcaggaggatggcttgaggccaggagttccggatcagcctggacagcatagtgagacctcatcttaaagaaagaaaaagaaattagaaatgagttttacaggccaaattaaggctgtgttccttctggaggctccaggaaagaatctgtttccctgccttttccagctgctagagctgggcccacctgcmtccatctccctatctcaagactaacgttaggcaggccgggcgaggtggctaacacctgtaatctcagcacttcgggaggctaaagcaggaagattgagcctgggagttcaagaccagactgggcaacatagtgagacccccatctctacaaaaaaaatgcaaaaagtagccaggcagggcacacacctgtagtcccagctactcaggaggctgagtcaggaggattgcttgagcctgggaggtcaagtctgtggtgagccatgattgaaccactgcactctagtctgcgtgacagagcgagagcctgcctcaaaaaacaaacaacaaaacaaacaaaaaacttctaatgtcatcatatctgcaaagtccctttagccacgtaagagaccatatctacagattccgggaattaggatgtggacatctttgggggtcattattcaacccaccacactcctcttgttctgtttcttactccttttctctcggtcacaatccttctcracatcttgctggctttgttcctgtgtcctctgctgctacttccctctgcctaccctctctctyacccagtagcatcctgaccagaccccactccgccccacccccaggattgcagaagtggctggctatagtcccgatgacctgatcggctgttccgcctacgagtacatccacgcgctggactccgaygcggtcagcaagagcatccacacctgtatgtatcccatttccccaggtgcgaagccagctgccacatggcccccagctgacaccaggaccccccagctccccataccccaggatgcactgcctccccacctcaacaccagctccctgctccccaagccccaaggaactgtctccttccttgccccctcatacccagtccccagatmtttctctccccatttgcccccttggtggccctgatccctcccgatccccctcctcagtgctgagcaagggccaggcagtaacagggcagtatcgcttcctggcccggagtggtggctacctgtggacccagacccaggccacagtggtgtcagggggacggggcccccagtcggagagtatcgtctgtgtccattttttaatcaggtaagcaggaggaggggctggggtggctgtgtgtgggcctgatctgcatgtgtggacaggtgtgtgtgtgtgtgtgtgtgtgtgcgtatgagcatgcatgtgtatcatgcataagtgtatgtgagggagtgtgcacgtgtacacatatgaggaatgtgtgtcaccatgtaaatgccggtgtgtgtgtctgcatggacacaggtatgtgtatgggtgtgtagactgttaawttttttttttttttttttttttttttttgcgtgaacctctgcttaagtggattgttaattcaaattagaaaggggtctttatttggcctggcatggtggctcatgcctgtaatcctagcactttgggaggctgaggtgggcggattgcctgagctcaggagttcgaaaccagcctgggcaacatgacgaaatgctgtttctactaataataccaaaaattagccgggtgtggtgacacatgcctgtaatcccaactactcgggaggctgaggcacgagaatcattagaacccaggtggtggaggctgcagtgagccgagattgcgtcagtgcactctggcctcggcaacagagcgagactctgtctcaaacaaacaaacaaacaaacaaacaaaaggactctatattcaagttaaaataagaagtgtaacagaatcatggggtcttttttgctttttaaattttgatgtggctcacacctgtaaatcccagaactttgggaggccaggggaggaggattgctagagcctgggggttcaagaccagcctgggcaaagtggttaggacccattctcaaaaaaaaaaaaaaaaaaaaaacctgaaaacagaccaaaaaaaaaaaccacacacacgcaaagatagatggtttrcatatggtaaattctctttatggtacacagttctgtgaatttttgacacacgcatgcagttgtgtaaccactatcacaatccagctattgaccaattagtgtgattataatagtggttacacaattaccacgattttttttttttttttttttgagacagagttttgccctcgtcactcaggctggattgcactggcacgatctcggctcacttcaacctctgcctcccaggttcaagcgattctcctgcttcagcctcccgactagctgggattacacgcaacaacacgcccagctaatttttatatttttaatagagaaggagtttcaccaggttggccggtctggtctcgaactcctgacctcaggtgatccacccccctcagcctcccaaagtgttgggattacaggcatgagccactgcacccggcccatgttgtggtttatatcagtagttcctttgtaaatagtgaacagtattccatggtatgaatagagcacagkttttttttttatccattcaccagttagaagacattgggctgtttccaagtttgggtgattacaaaaaaacagctactgtaaacattctcatacaagattttatgagatcacatgttttcatttctcttgggtaaacagctaggattggaatggatgggttatatagtaagtgtatatttaatctaagaaactgccatggctgggcacagtggctcacgcctgtaatcccagyactttgggaagccaaggaaggaggatgactagagcctctgaggtgaagaccagcctgggcaaagtggttaagactcaaccgcaaaaaaagaaaaacagaaaacctgaaaacaaaccaaaaaaaaaaaacaaacacaaaaatatatatggttttcatgcagtaaattctstttatggtacacagttctgtgaattttgacacatgcatgcaattgtgtaaccactatcacaatccagctattgaccaattagtgtggttacacaattaccacaatttatttatttttatttttatttatttattttttttgagacagagttttgcccttgtcactcaggctggagtgcactggcacgatctcggctcacttcaacttccgcctcccgggttcaagcaattcttctgcttcagcctcctgagtagctgggattacagctgggattacaccaagcccagctaatttttgtatttttagtagagtcggggtttcrccatgttggccaggctggtctcgaactcctgacctcaggtgatccacccgcctcagcctcccaaagtgctgggattataggcatgagccaccacacccggccattaccacgattttttacacaaaaatattctcttgtagtaaacccctcccacactcccatgtccctggcaaccactgtcctcagaccccagagttttgctttttccagagggtcacatacagggaatcctacagtatgtagccttttgggcctggctcttacttagcttgatatatttaaaattcctccatgttgtggtttttctttcttggtttttttgttttgttttgttttgtttttgagacagagtctcattctgttgcccaggagtgcactggtgcaatctcggctcactacagcctccgcctctgaggttcaagtgattctcctgcctcagcctcctgagtggctgggattataggcgcgcaccaacacgcccagctaatttttatatttttaatagagaaggagtttcaccagattggccaggctggtctcgaactcctgacctcaggtgatcctcctgcctcagcctcccaaagtgctggaattacaggcgtgagccaccgcgcccagcccatgttgtggtttatatcagtagttcctttgtaaatagtgaacagtattccatggtatgaatagagcacagtttttttatccattcaccagttggaagacgctgggctgtttccaagtttgggtgattagaaaaaaacagctactgtaaacattctcatacaagattttatgagatcacatgttttcatttctcttgggtaaacagctaggattggaatggataggttatatagtaactgtatatttaatctaagaaactgccatggctgggcacagtggctgaygcctgtaatcccagcactttgggaggccgaggagggcagatcagttgaggccaggagtttgagaccagcctggccaacatggcgaaacaccgtctccactgaaaatacaaaaattagccaggtgtggtagcacatgcttgtgaccccagctgcttgggaggccgagacatgagaatcacttgaacccaggaggyggaggttgcagtgagctgagatcacaccgctgcactctagcctgggtgacagagtgagattctgtctcaaaaaattaaaaaaaagaaagaaagaaacagccaggacagggtgcggtggctcatgcctgtaatcccagcactttgggagtccaaggtgggtggatcacctgaggtcaggagttctggaccagcctggtcaacatggtgaaactccatctctactaaaaatacaaaaattagcttggtgtggtggtgcatgcctgtagtgccagctactcaggaggctgaggcaggagaatcacttgaacctgggaggcagaggttgcagtgagctgagatcaggccactgcactccagcctgggcgacagaaggagacaccatttccaaaaaaagaaaaacagaaacagccaaactcttttccaaagtggctgtatcattttgcattcccatcagtaacgtatgggggttccagttgctccacatctgtgccagcatttcgcattgtctgggtgtttgggtttggtgttacttttagtcattctaatagatgtgcagtgggaaaatcacgatggggctttttttttccatcatgtgtcatagaagcttttcaccatttagaaatgcagaggtatccatgacaacattatgaggcagagttagaattacagcttttcggtcgtgcgcagtggctcatgcctataatcccagcactttgggaggctgaggtgggcagatgacttgaggtcaggagttcaagaccaggctgaccaacatggtgaaaccccgtctttactaaaaatacaaaaattagccagatgtggtggcgtgtgcctataatctgagctacttgggaggctgaggcaggagaatcacttgaaccccggaggcrgaggttgcaatgagtggagatcagaccactgcactccagcctgggcgacagagtgagactccatctcaaaaaaaaaaaaaaagaaaaaagaattataccttttctttgaagaaggttatcttataggacatgcaccagttttctaaagccttaggggtttttctagatctggaggaatgttctgaaatacaaatcaacatatacatatgtatataaattttttttgaaataaagtcttgctttgtcatgcaggctggagwgccgtggcacaaacagggctcgctgcagccctgacccacctgagcctcccaagtagctgggactataggygcgcactaccatgcctaatttttttttgtattttttgtagagatggagtttcatcatgttgcccaggctggtcttaaactcctgagttcaagcgacccacccgcctcggcttcccaaaatgctgggattacaggtgtgagccctggtacccagcctataattttttaaaaatagggatggggtctcactgtgttgcccaggctggtctcaaactcttgggctcaagtgaccctcccgcctcagcctcccaaagtgctgggattgcagatgtgaaccaccatgccaggcctacaaatcaacttatgcctcatgtctctacccttctcagagcccttctgaagctccccagtatcctcaggagaaaagccaagggcgttggtgtggttcaccaggccctgtgaagctcctgcctccctccccttctcacttaccctccaaatctcagggcctttgcacaggcagttcctccttcccagaatgctctcttctcttccctcctctcctttctcctgagtcatgcccgctcatccttccagtctcagctcagacatcacttctggagaccctctttcctgagcccctacatgagctcaggtgtcccccatgcccattttctctcctggtgtcctgtacttttgcaccagagcacttaaaaccatttgtaattatcctattaacttgtgtgttcagccaggccttcttcgatcgtccttttcaaaattgcaaactcccatcactgctttattttctctgtagtacttaccactatcttttttttttcttctttttttgagacagagtctcattctgttgcccagactggagtgcggtggcacaacctcagctcactgcaatcttagcctcccgggttcaagtgattctcctgtctcaaccttccaagtagggattacaagcacccgccaccacacctggctaatttttgtatttttagtagagatggggtttcactatgttggccgggctggtcttgaactcctgagctcaagtgatccacccacctcagcctcccaaagtgctgggattacaggcgtgagccactgtgcctggccctccctagtattaccactatctaacccaacgttgtccaataaaagcatgatgycagccacatatgtcatttggaatttttttttttttctttgagacagagccttgctctgccacccaggctggaaccacattaaaaaggtaaacrgaatgctgggcatggtaactcacacctgtaatcccaacactttgggaggccaaggccaggagtttgagaatagtcttggcaacatagggagaccccatctttacaaataatttaaaaattaacccagcatggtggcatatggctgtaatcccagctactcaggaggctgaagcaggaggatcactgagcctgggagattgaggctgcagtgagccgagatcgcaccactgcactccagcctgagcgagagagtgagatcctgtctcaaaaaaaaaaaaaaaaaaaaaagtaaacagaagcaggtgaaattaattttattttttaaatttcattttatttatttatttatttattttgagacagagcctcactctgtcacccaggctggagtgcagtggcgtgatctcggctcactgcagcttccacctctggggttcaagtgattctcctgcctcaacctcctgagtagctgggactacaggcgcatgccaccacactcagctaatttttgtatttttaatagagatggggtttcaccatgtgggccaggctgatcttgaactcctgacctcaggtgatccacctgctttggcctcccaaagtgctgagattacaggtgtgagccaccgcgcctggcctaattttaacaatacattttattttcatattcaagatcacaccactgtgtaagtagcggagctgggatttgaacccaggccactgactacagagtccttgctgtgaaccactacacagyagtgcttgatgaggatatatttgtggaatgatgaatgagttaactgaatgtgtcacacgtgcacatattcgagcccaagtgtatggagcatgtgagcatatgtgtccctatatgcactcaggtgtatgtgagcgctcctgtttgtgcctgtgtgtaccgagtgtgtatacaagttcgattgtgtgtgcttgtatctttcaggggaataagggtggctttgatccagcctaaattgggatgtttccagcccagggagggtttattgagtgtggggagaggtcatagcttctcaaggagctggtgggaagaccaggcccacctgcctcctgtcctgaagggggttatgcagatgagatacaaatgagggcctgatcctcagccccacccaactctccaaaagccaacttgcacagcgagcatttagattgtctctgcagccagagactgtgtgaagggaggtgccrgggacataaggatgtatttctaaacctgttcccttgagtatgaaaaacatctatgaatagaaacagcataaataaaatcttattcataaaaattacagccctatgaattcttcctatttggtcatgtaatgaagactatgttaaaaatatattttttcatcaatacctttctaagaatatgtttataagtaaaaatctataaagagaatatttagttattctgaagcctttcgctcaccccgctctttgcccctgggcctcctctctctgttcctaggtctcctcccgcttctgtctttcagtgccgccccacccccttccctcagtcttcctcctctctgcccaggctgtgctaaatgccagctcttttttctgcctttccttttacagaaggagcttgggaagggacaaacttaactttcttttaaaaatggtgtcagaataggccgggcacagtggctcacgcctgtaatcatagcactttgggaggctgaggcaggtggatcacctgaggtcaggagttcgagaccagcctggccaacgtggtgaaaccccgtctctactaaaaatacaaaaattagctgggtatgggggcttgcacctgtaatcccagctactcggaaggctgaggcaggagaatcgcttgaacctgggaggcggaggttgcagtgagccgagatcgcgccactgcactccagcctgggcgacagagtgagaccttgtcttaaaaaaataaaatgctgtcagaataaaaagcagtcaacagaaatgaaacccttataggagacaaataaatgtgggcaattattttctgcaaaatgccctccaagcccctgggcgccattgccttctgtaataggacatcacctgaacaggctttctgggctggagccaaggaccctccctgactcccacctccctttctgccttgtaccccagccrggtggaagagaccggagtggtgctgtccctggagcaaacggagcaacaytctcgcagacccattcagcggggcgccccctctcagaaggacacccctaaccctggggacagccttggtatggggcagggctggggccgggaggggttgtgtccccagggcccttgggagaaagcccaagcaccttaacatggctcaccaggccctgtgggacctgcctcctgcctcccttccctgcgcactcagcctccaaaacacacagcctcctaagagcccttggaacactccagcctcgtgcctcagggcctttgcacaygcagtttcctagaatgctcttctctctcctgtcctccctccccttctgtggctatggggtggttgcttcagtctcttgctggcctctgctctaaatcctgctgtggctccacattgcccccacgcttctgcctcttccctgttctggctttgctgctctttggcttccagtaatctcgatcctcctaagtctggctcctttctccctcttccttcactctcctgccatcctggatgagcctccctcccagtctatccttcaagacctcaccttctccaagctgttgctggccacccatgctcctgggtgtggggtgggattgctgatataatatcctttccttttctggctcagagctggctctgggccttgtcttaacctctggggaccttacagcctccttgagggcttggggccagtcttttctcctaaggtgaaagctccccagagctgaatggccaaatgctgttctgagccaccaatcccttcccctcggacctttcagagcctcaccacaatctggccactgaagttcacaccygggctgggagcagtggtttatgcctgcaatcccagcactttgggaggccgaggtgggcggatcacttgaggtcaggagtttgagatcagcctggccaacatggtgaaaccctgtctctataaaaaatacaaaacttagctgggtgtgatggcgggcacctgtaatcccagctactctggagactgaggcaggagaattgctcgaacccaggaggcagaggctgcagtgaactgagatagtgccactgcactccattctgggcaacagagctagactccatctcaaaaataaaaataaagttyacacctggcccagcaggggtcctccaggccccttccttaccctcwcactaagaacagtggccatcctgacctgctgaagatgtcaactgtgttcctggggttggtatggagggctctggcccttggccctcagtcaccagcccgtgtcctccccatctccatgtgtcctgcagacacccctggcccccggatccttgccttcctgcacccgccttccctgagcgaggctgccctggccgctgacccccgccgtttctgcagccctgacctccgtcgcctcctgggacccatcctggatggggcttcagtagcagccactcccagcaccccgctggccacacggcacccccaaagtcctctttcggtaagccatcccacccatgtgagccctcagcatccagtgctcagtccctcagggggtcttggcctgtgacttaaacctgactgttctctgggcctcagcttctccatctgtgtagtggggaggttgggatgagatggggttgaggttcctttaagacgcagatccagatttttcaattgttagaattccagagtctggctctgtttagggaaaaactctctcaagctatgtttttcctctgctctcctaataatgcaacaatcgtcaacacagaagaagacttctgtgaccaaatgtgggcagtttttcccacacaccaagcagcggacaccagctgggtgtcctccaattcaattccggcatcatctacctggagatagtgtcagatttcacaggttgggcctcagtccccaagactgctctttgctcttcagacaccagtcacaagtctgggcctccagaatttcttttttatttttatttttattttcgagatggagtctcactctgtcacccaggctggaatgcagtggcgcaatctcggctcactgcaacctccacctccgaggttcaagcaattctcttgcctcagcctcccaagtagctgagattacaggtgcatgccaccacacctggttaattttttgtatttttagtagaggcagggtttcaccatgttggccaggctggtctcgagctcctgacatcaagtgatcttccggcctcggcctcccagagtgctgggattacaggtgtgagccaccgtacctggctctttgggtttgattaatttgctggagcggctcacagtaatcaggacaacacttatttaggtttactggttcattgtcaaggatattgcacggatacggatgaagggatacattgagtgaggtatggaggaatgtagggtttcggagcttccatgccgtcccgggcaccaccctccagaaacctccatgggtcagctatctggaagcccctccaacccagtcctcttgggtttttatggaagcttcatgacatcagcattccttcccccagggtatygggcaggaccctctctggggacagtggttttttttttgttgttttttttttgagayggagttttgctcttatcgcccaggctggagtgcaatggcatgatctcagctcaccacaacctgcgcctcctggattcaagcaatgctcctgcctcagcctcccaagtagctgagattacaggcgcacactaccacgcccagttaatttttttatttttagtagagacrgggtttcaccatgtttgtcaggctggtctcgaactcctgacctcatgatccacccgcctcggcctcccaaagtgctaggattacaggcatgagccaccgcgcccggcctctggggacagtcttatgacccacaatcaaaaaggcaggggaagattagagacctgcctttgggcaggtgaaacgagggcagaagaaggctggagaggttctgtttcctgaggcctaacacacccagtgttctaacaaaagactgttagaactgttttactagactgttctaataaaagactgttctaacaaaagacaacggccatgggagtttgacccaggaaccatgcacaaaatcatatatatatatgtgtgtataaaataacaccacaggccctgtattagtctgtcttcacgctgctgctaaagacatacccaagtctgggtaatttataaagaaaaaaagatttaatggactcacggttccacatggctggggaggcctcacaatcatggcggaaggtgaaagatatgtcttacatggcggcaggcaagagagaacgaaaaccaagcgaaaggggtttccccttataaaaccatcagctctcatgagacttattcactatcacgaggacagtatgggagagaccacccccatgattcaattatcgctgaccaggtccctcccacagtgtgtgggaattatgggactatagttcaagatgagatttgggtggggacgcagccaaaccctatcaggcccctaacctgggatgtttggaactggcacagatgaccctcctcccactccagcttgtgactaagcatccagttctctgaactttgacctcaaagagtcaaagtgtctaatatcctgatttatacagacctggattaaatcctaaatctgccatttatcagccacgttaccctggctgggcaagcaagttcttgaggccttaatttcttcacctataaaagaaagataataacatgtcaccacatcattggttattctgagcattaagtgacagtattcatgagaagcactcagtaggggcctggcacctatcggtgctcaacagatcataccagttactatcaatatttgttgtgaagatagtctgacctttgacctcagtgggtccacgttatccagtgttgactgtcttcatccccactctccaccccaagaaaatatcctctctccagagaaatacagactgtgacctttgacctcatcctttacccctgagacagctgaactctccattgtttccccactaaactccaggctccaagacctttaaccccagaggatttgtttgaaagtcttggcctcakgctgggtgcggtggctcatgcctgtactctcagtactttgggaggctgaggtggggagattatctgaggtcaggagttcaagaccagcctgactaacatggtgaaaccctgtcactactaaaaatacagaaattagccaggcgtggtggagggcgcctgtaatcccagctacttgggaggctgaggcaggagaatcacttgaatccaggaggtggaggttgcagtgagctgagaccacgccattgcactccaacctgggtgacagagtaagactccctttcaaaaaaaaagtcttggcctcaagctcatgtttttatttatatatatatatatatacacacacacatatatatatacacatatatatatacatatatatatatatacacatacacacacacacacacatatattgtgtgtgtgtgtgtgtgtgtgtgtgtgtgagacagagtcttactctgtcacccaggctggagtgcggtggcatgatcatagctcactgcagcctctgcttcccaggctcaagccattctcctgcctcagcctccctagtagctaggaccacagatgtgtgccaccacacccagctaatttttgtacttttagtagagacagggtttcaccctgttggccaagctggtctcgaattcctgacctcaagtgatccacccaccttggcctcccaaagtcctgggattacaggtgtgagccactgagcccagccaggctctgatccttctaactggaacttccatgtttgccccatccatctatgtacacccaggcattctgagttttgaacacccaggttcaaaactcatctgcatttgccgttggaccccctttgtgccccagatgcctggcatttgatccccacttctacccttgagctgcagactgtcttaatgttgatacctcccaggctcaagatttcctgaagtttctactccatctctccacaggctgatctcccagatgaactacctgtgggcaccgagaatgtgcacagactcttcacctccgggaaagacactgaggcagtggagacagatttagatatagctcaggtaagggctggcatggaagggagtaatcctcagccctgtgttctggggattcacatatgtggctttagagaagggtagtgggatggttaaaggaatgaatggatggatggatggaccattgtattcattaggtggatgatggtggatgaatggatgaggtttaggcagatattttaatggatggatagatgggtgggtaggtggatgaatgtttggatggatattttgatagctggatgaaaaatggataggtgatacttggatggatgatttattgaatgcatagataaaatgacagcagcatgatgtattagttatctactgttgtgtaacaaattgcctaaaaacttaacaccttaaaacaacaactatttattatgtcacatggtgactgaatatcagaaattcaggagcaccttatctgctggtttttgctgagtctctcatgaggttgaagtcaaactctcagtcagggctacagtcatctggggttagagggttttcttccaagctcacacacatgaggttgttggcaggcctcaatccctcactttgctttggctggaggcctcagttcctcatcacgtgaacctctacatagactccctaagtgtcctcacaacatggcagttggcttccctaaggcaaacaatccaacaaagagaaaaagggacaaatggagaagtagagagatagaaagtacaagtcccagactgaagacacagtctttcatggcctaatctcagaagtgacaaatcatcgcttctgccatattgttttggtcatatagatcaatcctgtacactgtgggaggcaataacataagagtgtgaacatcaagaggcagggatcattgggaacttccaatgattgatgtctctccctcatgcaaaatacactcacccacctctcaaggccccccaaagtctcccaaagtttcttccccttacagcatcagcttgaagtccagaatctgatcatctgaatctggtcttggtgctggggaagctccttgagtacagttcctctcaacattttggcttgtggactaatggggacaagtcatctgtcacccacatactcaatatacagtggtgagacaggaatagacactactattcaaaaaggaggggtaagaggggcatgcatatatccctggtccatagcagttttgaaatccatatgggaaaatatcacaagttctttcattaggactttaaaaaaaaactgggggccaggcgtggtggctcacgcctgtaatcccagctctttgggaggccgaggcaggtggatcttgaggtcaggagatcaagaccgttctggccaacatggtgaaaccctgtctctactaaaaataaaaataaaattagctaggtgtggtggcacatgcctgtaatcccagctactcgggaggctgaggccagagaatcacttgaaccagggaggcagaggttgcagtgagccgagattgtgccactgcactccagcctgatgacagagctagacttttgtcccaaaaaaaatatatatatatataaaaatagagacagggtctcagcccaggctggtcttgaactcccaggctcaacctcccaaagtgctgggattagaggtgtgagccactgtgcctggcccaagggtgctcttcattgctctgagaccactttttttttcttttttctttttttttttttgaaatggagcctcactctatcacccaagctggaattcagtgacgcaatcttggctcactgcaacttccaactcccaggttcaagtgattctctggcgtcagcctcctgagtagctgggactacaggtgcccactaccatgcccagccaatttttcgtatttttagtagagatgtggtttcaccaggctggctcagagaccacttattaatgttagcatcatttgccatctggagggctcctgcagtcagccaaactcaaggttaatggcatggttctccagactgccaagtctgcccaagacttctgacatcagacacaagtttgagggtccccagggtcacccttactttagaccagctgcctaccaatgtggagattcccagactcctgtagactccctcaagtttgataatttgctagaagtgttcatggtactcagaaagtgctatacttaagattgtagttttattataatgaaagaatacagatcagaaacagacaaaggaagatattcataggtggaatctgggactggagggtcccagatggaaagttttcttctcctcagggacatgttgtcctcccagtattgacatgtagcaatatgtggagagtaatgccaactcaggaagctcaccaaagcatcagtgttcagagtttttattggggtttcattgcataggcatgattgagcaaattaccgcccatgtaattgaattcagtctccaatgctacctctaccttccctggatccggctgattttgtgcgggccaaagccccaaccctctaatcacaatggtggttctttctgcatggccagcctccatcctgagttatctcattagcaaaaactatctaggggctcaccatgagtcacctggttagcataaactatccaaaggacccacagtgaatagtaaagacactgctatcactcagaacattccagaggtttagaggttaacttccaggagctgggacaaaagccagacctctctttgggtaaagttaattattcactacacaaggaggttgagaatcttcaaaaccttcaagtactatctccttcatgtttaacatttcttcctttaggagaaatatttttttatctctctctcttcttgccttttactataagtaacaagatgaaatcaggcagccccttcaacactctggctgggaatcttagctggatcacctcgtgtatttgttatattttctactttccacataactgcaggcaacagtgttgctaaactttcagccactacaggacaaaaattctctttcctctggtttccagtgatatgtttctcacttctctctaagccctcactgagtcttctcaatgttcagattttgaccaatggtttctttgaggcatttaggtttgtttttttttttgagacagtatttcactctgtcactcaggctggactgcgatggtgtgatcatgctcactgcaacctcaaactcctgggctgaaacaatcctcccacctcagcctcctgagtaattagaactacaggcatgggccaccatacctggctaatttttttccttttttgtgtaggtgggggtctcactatgttacccagactggtctctaatttctagcctcaagtgatgctcccgactcagcctcctaaaagctctgggattacaggtgtgagctaccatgcttctgacccagtttaggatttctctaacatgttcttcagggagtccttatacccattttacagatgaggaaactgaagctcagactgttgaccacaggcacagaactcagaagtgatggtgctgggacttcagccaaggtccacccaagtccaaggctcatcctcttacctccctcctgccctccgcaggatgctgatgctctggatttggagatgctggccccctacatctccatggatgatgacttccagctcaacgccagcgagcagctacccagggcctaccacagacctctgggggctgtcccccggccccgtgctcggagcttccatggcctgtcacctccagcccttgagccctccctgctaccccgctgggggagtgacccccggctgagctgctccagcccttccagaggggacccctcagcatcctctcccatggctggggctcggaagaggtgagccacagtaaaggggggacatcaaggcagcatcccctcaccccgtcttgcccctgcctcctgcttcagcctcatccctcaccatttctctaaccctgatctctgctccagccaggccctcggtgggcccagcacatgccaagtttgtgccaatctctgtgcctttgcctaggctgtacaccccttctggagtgccctccactgctctcactgtttatccaaatcccacctgtcaaccagggctctctcctttggaacatagttatatctgatctggtgacaatttttgtcagagtttagaagacattgccgcgtgtcagagaaactatctaagccgggtgtggtggtgcatgcctgtagtcctagctacttgggaggctgaggtgggaggatctcttgagcccaggagatcgaggctgcagcgagctgtgcttgtgccactgcactccagcctgggcaatggtgagaccctgtcaagaaaaaaaaaaaaaaaaagatagagagagagagagagagtgaagagagaggaaggaagggaggaaggaaagaagaaggaaggaagggaaggagggagggagggagggaaggaatggaaaaaagaaaagaaactgtctagaactaaattgcaagcatgtgctcatttcgaatccagagtggtcttatccttatggatacatcttggtatctcccaaggctcccagcttggtactggctataaagtgggcctgataaatacttattaaatgagggagggagggaattattaatgaatatagttggcactttaatgggtggacaggtggatggatgcataggtcgatggaaggacagatggatggatgtgtaggtgaaagggtgtatgtatgtatgtgtgtatgtctggacggatggatggatgaatgatggatgtctgggtagacagaaggattgatggatgggtcaatggattgatgggtggctgaaaggaaggatagatggtggatggatggatgaatcggatggatggagggatggatggatggatggatggatggatagttggatggatggtggatggatggcagatggatggtggatggatggtggatggatgggtggttggattaatcaatggattaatggatggatgcatggatggtggatggatggatggatggatggtggatggttggcagatgtatggtggatggatggcagatggatggatggatgaatcaatggattaatggatggatggatggtggatggcagatggatggcagatgggatggcagatggatggatgggtggatcagtggatggatggatggatggatggatggatggtggatggctggcagacagatggtggatggatggcagatggatggatggatggatggatgggtggtggatggctgggtggaaggatggatggatagatgaaggacaactaggtggataaataggtggatgaatggaaggataaatggatggaggttgggtgggtgggtgatggatcattggatgaatgagaagatggattggtggatggatggatggactggtgggtgtatgactaaaggaataaataggtgctcaggggagtgaatgaatgctcatcacctgcttacactgttatccacacttgcccaggtttgctgtgtcctgagattcttgcctgttttcctccaggaccctggcccagagctcagaggacgaggacgagggagtggagctgctgggagtgagacctcccaaaaggtcccccagcccagaacacgaaaactttctgctctttcctctcagcctggtgtgttgggggattaatgggattctctggccctcattacctagctggcttaaacctactgttttatagataggaaaccagagaggggcaggggctggttgagggtcatacagaaagtcagtgggccagctgagactaaagcctgatcttctagtttcactaatgggtattaaaaacctctgcagtgaactgagattgcgccactgcaccccagcatgagcgacagaatgggaccttgtcaaaaaaaaaaaaaaaaaaaaaaaaaaactctgcaaatacatgtaagatggcagtaagtcagctgggcgcggttgctcacgcatgtgatcccaacactttgggaggccgaggcaggtggatcacctgaggtcgggagtttgagaccagcctggccaacatggagataccccgtctctactaaaaatacaaaattagccgggcatggtggcgcatgcctgtaatcccagctactcaggaggctgaggcagaagaattgtttgaacccaggaacagaagattgcagtgagctgagatcgtgccactgcagtccagtctaggcaacaagagtgaaactccgtctcaaaaaaaaaaaaaaaaaaaggcaataagtgcaaagaaggaaaaattaagcaggctaaggggagaaatggcatgtggctggtatctgcagggatcttctctgctcccatgggaccccctccccaaactagaacaggtcttggccttggattactagtgcagagttcaaagtgcagacactagaatcagactgacctgggttcaagtcccaggtctgccacccagtaactgccacctgaccttgggcaggttacgtcaccacgtggagcctcagttgcctcatccagaaagtgggaatagttacatctcacgggactgccatgaggattaaaggaaattaggcccttagctgacactcagtgggctgaccataaatggtgtacaaaaacaaaccaaagggccgggcgctgtggctcacgcctatattcctagcactttgggaggccgaggtgggtggatcacctgaggtcaggagttcgagaccagcctgggcaacatagtaagatgctgtctgtacaaaaaaaaaaaaattaaaatttaagcgggtgtggtggcatgtgcctgtagtcccagctacttaggaggctgcggtgaaagcatcacccgagcctgggaggtcaaggctgtagtgagccatgatcgtgccactgcactccggcctagatgacagcacaagacgctgtctcaaaaaaataaaaataaaaaagccagcctggactatgtcacttctgcaaggcctccctctaggacctttcatggccctctagtgcttacagcagtgccctggttcttcactctgcaaagggttgtttgaatatgagatgtggttgataatataacagtttacaggccagacataatgcctcacgcctgtaatcccagcactttgggaggatgaggcgggataatcacttgaagtctggagttcaagtccagcctggccaacatggtgaaaccctgtctctactaaaaatacaaacgttagccgggtgtaggtgcacacctatagtgccagctactcggaaggctaaggcacaagaattgcttgaactctggaggcagaggttgcagtgagccgagatcgcgccattgcactcctgcctggaggacagggtgaaactccctctcagaaaaaaaaaaaaaacaacctctctctatatatatatatgtatatatgtgtgtatatatatgtatatatgtgtatatacatatataacagcttacacttattaagtgcctaccatgtgccagacactaactgcactaaattccttgcatgattaacttatttaatccccacaactactattgaaatgttcttgttactgttatacacacttacacagaagaagttaaacaactgtatcagagtctgcacaggaaaggcagcacactcagagggagtgttgaggagaatttaataacaggactgttgaaaaaggtgttaacatagtgtagggaaatcagcaagcctggtgcagtaccttggggcacagcatgggaagtgggcatcagccctggcctgaaggtgcagggcggggtggtcactggatcctgcagcgagtggagtccagctaatgagggctgaaaccttccatggagggacaccgccaactcacagagaagaataaataccctacctgctggtgtctcccatgagctaaccaacaggatcacacggagcaaagttgcatgctgtcacggtctctgtgtacaggtcctcgggcgaaggaagaaggagaagggggatgaggccctggaggaacacaagtaggatgactggacagggactgacccaaagtcacaccacaaatgggtggccactggacctcagcatcccttaactactgcaccatcttgtctttggatatatatttttttccttcctttctttttcttttcttttcttttcctttcctttcttttctttctttcttttttttttttttttttttttgagacagagtctcactctgtcgcccaggctggagtgcagtggcgcgatctcggctcactgcaaactccatctcccgggttcacgccattctcctgcctcagcctcccragtagctgggaccacaggcagctgccaccacgcctggttattttttttgtatttttagtagagacagggtttcaccgtgttatccaggatggtctcaatctcctgacctcgtgatccgcccaactcggcctcccaaagtgctgggattacaggcgtgagccaccgcgcccggcctcttttctttcttttttgagatggagtctcactctgtctaccaggctagagtgcagtggcacgatcttggctcactacaacctcctcctcccaggttgaagcaattctcctacctccgcctcccaagtagctgggattacagacatgcgcaaccacaccctgctaatttttgtatttttagtagagatggagtttcaccatgttggccaggctggtctcgaactcctgacctcgaatgatccacccatctcagcctcccaaagtgctgggattacaggcgtgagccgccatgcccagcttatttcattttttaaatttttttgtagagatagggtctcattatgttgcccaggctgatctcaaactcctgacctcaggtgatcctcctaccttggccttccaaaagcactagaattacaggcatgagccactgcacttgcccttatttttattttacttttatttttatttttattagagataggatctctgtcacccagactggaatgcagtgacacgatcatagctcactgcaacctcagcctcctggtctcaagggatcctctcacctcagcctcctaagtaactaagattacaggcacatgccatcacacccagctaatttttaaatttttgtagagatgagatctcactatcttgcccaggctggtctcaaacgtttgggcttaagtgatcctcccaatcctctggcctcagcccccgaaagtgctgggattacagtcaccactcccggctgttccttggatactaatgatgatgatgatggtggtggctttgtctctctcccacagagtttccttctgacaggaggaccagccccagggagcctgcaggaccccagcaccccactcctgaacctgaatgagcccctgggtgagtagcaacctgggtatccagagccccagagcaccttctcccccgggaggtgcgagagggatggagccattccaaaggtgctgggggactgtcagtgcttggaggtgaccttggtggaaacggcagctcctgtctcttctctcttctcatgggcactgtggaggagagagcccctaagggaggcaggggctctccaaggctgccttttggggtggaagcccgagcctaggtctctggagcctgcacgcctatgatcacatttatttatttatttatttatttatttatttattttttgagatgaagtctcactcttgtcgcccaggctggagtgcagtggcatgatctcggctcactgcaacctccgcctcccaggttcaagtggttctcctgcctcagcctcccaagtagctgggatcacaggtgtgtgccaccacacctggctaatttttgtatttttagtagagatgaggtttcgccatgttggccaggctggtctcgaactcctgacctcaggtgatctgcctgccttgacctctcaatgtgctggaattacaggtgtgagccactgcacccagcctaaaaatttttttttaattggctgggcatggtggtgcatgcctatagttccagctactctggaggctgaggtgggagggtcacttgagcctgggagttcaaggctgcagtgagctatgatggtgccactgcattccagtctgggcaacacagcgagaccctgtctcaaataaaaaagagtgcaagagggcagggtgagtgtttcctgcctgtaatcacagtgttttgggaggctatggaggggaggatcacttgagaccaggggttcgagaccagcctgggaaacatggcaaaaccccgtctctacaaaaaatttttaaaaacctggtgagtgtggtggcacgcacctgttgtcctagttacttgggaggctgagacgggaggattgcttaagcccaggagttcgaggctgcagtgagctgtgactgcaccactgtactccaacctgcgtgacagggcgagatcctgtctctatttatttattttcacatttttattttctttctctctctctctcttttttttttttttttttttttttttgagacagagtctcgctctgccacccaggctggagtgcagccgtgcgatcttggctcactgcaggctctgcccccaggttcacgccattctctggcctcagcctcccgagtaactgggactacaggcgcccgccacctcgcctggcaaattttttgtatttttagtagagacagggtttcaccatgttagccaggatggtctcaatctcctaacctcatgatccgcccacctcggcctcccagagtgctgggattacaggctttctcttttttttgagaagggtctcgctctgtcactcaggctggagtgcagtggtgcactgtcagctcactgcagcctctgtgtccccgggctcaagcgatcctcccacctcagcctcccaagtagctgggactgcaggtgggcaccagcacacttgactttgtgtgtttgtgtgcgtgtgtgtgtgtgtgtttagtagagacagaatttcaccacgttgcccaggctggtcttgaactcctgagctcaagcgatccactcatctcagtttcccaaagtgctgggattacaggcgtgagccaccgcaccaggcccctgtctctaaacaaacagtccaggtgcagtggctcatgcctggaatcctagcactttgggaggctgaggcaggcggaccacctgaggtgaggagttcaagaccagcctggccaacatggtgaaaccctgtctctactaaaaatacaaaaattagccaggcacactggcaggcgcctgtaatcccaactactcgggaggctgagacaggagaatcacttgagcccaggaggcagaggttgcagtgagctgagatcacgccattgtactgcagcctgggcaacacagcaagactctgtctcaaaaaatataaatataaatataaacaaatgaacaaaaaagagtgggagatgaaaataagtgtaacggggaaataatgcatgcaaggaaaaaggtttggagtagggggatttcagttttaaacagtatgatcagggtggtttcattgagaaggtgatagctgagcaaagacctggagtgagtcctgacgatatcggggggaagagtgtcccaggcagagagaacagcaagtgcaaaggcccttaggtggggactgtatctatcttttttggggtgtggggggacagggtgtgtcttgctctgttgcccaggctggagcacagtggtgcratcacagctcactgcagccttgaactcctgggctcaagcgatcctcccatctcagtctcccaagtagctgggactacacttgtagctgggactacaagtgcgcttcattacgtctggctaattttttaatttctgtagagaaagaggtcttgctatgttgctcaggctggtctcaaactcctgggctcaagtgatcctcctgcctcagccttccaaagtgctgagattgtgcctggctgtctctgtcttctttggggaaaagcaaggccaatgtagctgaagcagagaggagagaaaggtgagggctgactgcatggagcctctgtggggcattgtgatggctttgaagtcaccttgcttgaggaggctgcctcagggcctttgcatatcctgatccttctgcctggcatacttttccctctgttctttgccatgttaccacatcctttagatctcaaaccaaatattactccttacacaaagccctgcctaacttcatacgctcatggtttataacactccataattacacaggcctttgtgtcataatttgatgactgtctgtcttctcctttgggtatgagaccttcaagggcaggggccagggctgtctgggtccctgctgttctcttctttgtgcacatgggtgggcggtggctaagcacagaggaagttctcagcacatatttgtgaatgaggagctaagattcacgcactcgcactgtgcctagctttgtgctaaatcctctatgcacctgatccaattggcgcttctcactggagtgtcggtcccataagggcagggagattcatccatcctggtcactgctgtgtctctagcacctggcacagtgcctgacacaaagtaggtgctcagtaaacatgttgggttttttgttgtttttgagataggttttcactttgtcacccagtctggagtgcagtggcacaaacacagctcaccgcagcctcgacctcctgggctcaagtgatcctcctacttcagctcccacaagtagctgggactgcagctatgtgccatcatgcctggctgatgtttatatgttttgtagagacgaggtttcaccatgttgcccaggctggtcttgaactcctgagttcaagcgatccacctgccttggcctcccaaagtgctgggattactggtatgaaccaccacgcccgacagtaaatatgttttgaatgaataaactctcataaatgaagtatgtgtgagtatcctggtttcccaagtaacaacagctgacttaactgctttctcaccagtactagttatggttcaaaacaccttccatggatttactcatttattcctcacaacagaggagtaaatcaagagggaggtgctgttattagcccgtcttacagatgagggaactgaggcacagagagatgaagccacctgccccaggtcacacagcaagtaaatagcaatgcctggattcaaactagggcagcatctgactctggactcgggttcttcaccgcagccctgaacaccccagagaggttcagagagcagaacgtgcccaagacgtcactgccgtttgaatccagacaggcttgcctcaccacccaggcttttaactgccaggaaggggagacgggttggtgtgggatatgatgaggtttctcttcaaataacccgatcaatcttttattctttaattgatagtaccccccacctttttcccttcttctcctcttttcctttttgcctttgttaaatgcccagacacgccacaataccaggcgttatcaataccagctcacattcctttccttatttaaaaaaaggactaactttctaactcatcacagacaccccttcccctttcctctctgctttcttttacgtgtccaccttatctaaaaaaaaatcaaatgtttagccaaccgaaattagtttaaattgtataacccgaccccagccaataaaaaaaaagtacaaaaacaagacttgcgtcaaaaataaaggctcttgtgcccctttgttccagtgtgctctcatggcaactagccaaagaggcacccctctgcgcaaaagtaaaattactaaaaatcctttgttcgagtgttcaatttccttaagattttaaacattattcctgacattggggttatggttgtcctgtgatttatctttcgtcttttacctttcatttatcatttatctttcatctttgcaggcctgggcccctcactgctctctccgtactcagacgaggacactacccagcccgggggccccttccagccaagggcaggctcagcccaggctgactgagccggctcctctccccatctgccttctcctcccccagaaaggacctcaaccacactccacgccggcagccaacgcacaggatgggggcgccaggagaggggcccctctctcctctatgtaccccctgcccacctcgggcctacctcagccctcacccctctgcctgctcccaatctgggggctctctggggtggtctcagctcagtgacctctgggaggtggtccctggccccctcctccttctctcaggatttctcttggggttctcaatacttggttacctcattatccctttctctgcctctcttggctttattttggggaatcaggggtgaggagggttgggggggtcatatctgtgtttccaggttctggggagaacaatgatccacgggtcaacgtgatcacatttccttctatccttcttgtattattatttttatttttgtcaatttcatgatatggtttttaatcatgatgaattgcctggggtctgtaagaatgtgggactctgatcttccccctcttcaggtgtcagtgcggagaggctctgggccagacctcacccccagtgacttccgattgaggccaaagaccccaagctgcccgccagctctgactgccccttgcgctctgggcttcctgccgcccccagctttgcctggacactgacttcattcatggtcctcctacttcaggggcagcctcccagttcctctgcttccaaactatgcaacctccaacctgctccagttccagactgtataacctctgacctgcactggttctagaccacacaacctccaatgtggtctgctttagatcaccttcttcttcttccttcttcctcttcctcttcctcctgctcctcttcctcttcttcttcttttttttttttgacagagtcttgctctgtcacccaggctggagtgcagtggcgcgatttcagcttactgcagcctccgcgccctgggttcaagtgattctcctgcctcaacttcccaaatagccgggactacgggcatgtgccacattgcccggctaatttttgtatttttagtagagatggggtttcaccacgttgtccagtctggtctcgaactcctgacctcaagtgctccacctgcctcagccttccaaagtgctgggattacaggcgtgagccactgcacccggctagaactcactttctccaaatccctctgcttcgaatttcaccgtcttcagctctttctagttctgggcctcaccagcctctcattctgcctgttttcaaaccttacgatccccaaaaattgtctggttctgggcctctaactccctctggctctatagtctatgactaccagattcttttggttctagaattcactaacttcctctggttctagacctcttcctataaattaatccctcttgttttagatctcacaccctccaacgccctccggttccagatcttatattcagtgatttcctctggttctggaccccacaactccaagcttcctattggttccagttctcctgatcggtaatacatttggttccaaatccagacctcttaatctctctctttttttttttttttttttgagacagagtcccactctgtcacccaggctggagtacagtggctcaatctcggctcactgcagcctccacctcctgggttcaagcaattcttgggcctcagcctcccaaatagctgggattacaggcatgtgccaccacgcccagctaagttttatatttttagtagagacagtgtttcaccatgttggccaggctggtcttgaactcccgacctcaactgatccacccgcctcagcctcccaaagtgctgaaattacaggagtgagcctggccagacttcttaatttctaaatcacttttgttttagaccttatgaggctcagcttattcttctgcagttctctataaccaagactcattttctctcatcaaaaacaagtacagagagtttgatgtgtttatctcttttttcttcytcttcttttttttttttttcttttttgagatggagtctctctctgttgcccaggctggagtataatggtgccatctaggctcactgcaacctccgcctcctgattcaagygattctcctgcctcagcctcctaaattggtgggattacaggagcccaccaccacatccggctacctttgtgtattttttagtagagacggggttttgccaagttggaggggctggtcttgaactcttgacctcagatgatccacccgcctcagcctcccaaagtgctgggattacaggcataagccaccgtgcccgaccctgtccttatcttataataaccagttcttctagaaccagacgatgctctagttctcctagattctgaacctcatgacctgtaccactcactagttccagactacacaacttctagaaggtgccacctccagggtcctgattcaagatctggtgatctgctgtttctctggttctagaactgacttacaagtgccttctgattctagacctcattccgtaagttcccttggctctagacttcatcatttccagctcctcctcactcaagatctgactccaaattaccctgggtctagaattcagccttcaaatatcttctgattttagactttgccttatacatttctctggttttagatcttaccaccctcaactccttctgattctagatcttatggttcccaaatctctctggttctagaactcagattttaggcttttgtttttccttttttttgttaaaaaaaaaaaaatagagacggggtttcaccatgttgcccaggctggtcgcgaactactgagctcaagcaattctccctccttggcctcaccaaagtgctgggactacaggcatgagccactgagcccagccaggctttttctaattctatgctttattctataaattcctctgcttctaagcctcacagcttccaactgcctttgatttcagatccaaattcctctgattctataattcagcctccaaatgcttctgattctggaatctagacttttccctaaagattcctctggttctgaatcttataacctcaactccctaattccagaccccagcctcctaaatctattctgggcttcccaccccactgaacttacccaattccttctttcagtcttaagttttcccattctaracccctaccctctaggctgtgctgctcctggacttcatgcctctccattctcattgcctacaatctctgtgccccagaaccccctccacttcccaccccagccctccagacatgcacttaccttgactttaccccacatgtttggggcacctggggctccctcaccccttgggtggtttgcaatctgaagacttctccagccacacaggcacatgcacaggcacggtgctgtctgcatattgccaggtggggagagaagccaggacccctcagctgtctgccaccatctatgtgcctcccttaccccccagctttctttctacagatggtgctactcttggtctcccacaggaaaaggcctccccccttcttagccccatttaccccgtttgtggaaggcactgctcgctctgttttgtcagagagtggcctatccagattggtgctatgggggggtctgacccctccctcctccctctggaggtgatgtgggccctcaatggagggaattgtgctgggctagggaaaggggagggactagactggccacactggctctgaaactcaccaatctctatacaccataaagacctcaccttggtaggcaccagagctctgcgtgttgactcatcttttggatctcctctgggagtgtgggtgcactggtggctgagtgtctttttttttttccttccttccttccttccttccttccttccttccttccttccttccgctctctctctttcttttctttttttttttttcttggagtctcactctgttgcccaggctggagtgcagtggcacaatctctgctcactgcaacctccactacccaggttcaagcgattctcctgcctccgtctcccaagtagctgggatttcaggcatgtgccaccacacccagctaatttttgtgtttttaatagagatggggtttcaccacattggtcaggctggtctcgaactcctgaactcaggtaatctgcccgcctcggcctcccaaagtgctgggattgcaggcatgagccaccatgccaggccctttctttctttcgagacagggtctcactatctcacccaagctggagtgcagtggtgtgatcacggctcactgcagcctcctgggctcaagcaatcctcccatctcacccttcccggtagctgggactacaggtgcatgacacgaggcccagctaattattttcatttttttgtagagacagagccttaccatgttgcccaggctggtctcaaactcctgggtttaagcgatcctcctgcctcagcctcccaaagttctaggattataggcttgagccactgcaccagccccatgttactttctgattctgtgtatctgtatgtgtgtgtgtgtgtgcatgcacacgagtgtgtgcacagtgtcattctgtgtatgtgtatgggtctttgtcacattctgtgaacctgtgttgcagcaggtgggtggggttgtgattccttctacaagtgcatattagtatctgggtgaagtgattctgccttatgtgtgtttctggttattttgggtttctgtgtttctgagtgtggaaggtgctgtgatttttttttttttttttgcctatgtatgtctgtatgatgtgattctgtgtacatgtgtgggactgcttgatgctataattctgggtaccaatgtgtgtgtgacatgattgcccatagttaagtgagcatgtgtgtgcaagagtgtgtgtccatggactcatgtgcaggtgggtgtgtctgttgtcatgtacgtcactctcataaccccccatacagggttgcacataggaatctcttcaagggaagaaaaacactctcaagcctttgcacttcctattcttctgcctgaaatgcctctctcccttcccctctcccctcacttggttacctcctactcatatttcacatcttggtttaggtaacagctactccaggaagccttccctgcctgctccaattgggtaaagtgcccctaaaagctccccttggaagccccctcccatcacagcactaggcactctgcccaactctgaatatttgttttgttttatttgttttttgagacagagtctcactctgtagcccaggctgtcgtgcagtggcgcgatctcggctcactgcagcctccgcctcctaggttcaagcaattctcctgcctcaacctccctaataactgggactataggtgcgcaccatcatgcccagctaaatttttgtatttctggtagtgacggggttttgccatgttggccaggctggtcttgaacttctgacctcaagtgatctgcctgctttggcctcccaaagtgcttcgattacaggcatgagctaccatacccagcccactttgagtatttgtgatggagtgaatataaaagtactactctgtgtcaggctccctgacaaatgctgtactcatgttgtcgaactctcctctaatcctgtatgatggggataattattatccccactttacagaggttgaaactgaggcttagaagagggtgatcacttgcccaaggtcacagtgtcaggaaggattccgctggactcgaaaccagaattcaaatccactatggcagctccttttcccccaaccccaaaacaaacaatacgaacaaacaaaagaaaaatttactaacccaccaagatgggctctggcacctacagaggcagtagagtggcaatgaaggacataggaattagatgggattcctgatcctggctctgtcaccttcttatgttgttgtgaccttcgtcaaacacctctgcaagtctgtgtctttatctgtaaaatggagatgatactaatatctgccctttagggtgattgttggttgtgctgggggccagtaggagagatggggttggactaacaagaggtttgggagtgggatagataggtttaggagtgtgcttccaggaggggatccagagccttacaggacttagtgctacatgagggcttagaaaggacagactggaagcgtgtacggcgggtggggattggcaaaggggtggaatctggatattagactattcagcctgaggttaagactattcagggtctcctaatcaggagtttgggttttctcctaagggtgctggggccatggaagcctgggagcgagagtgtgccatggttttatcatgtcttagaaagatccctcggccgggcacggtggctcacgcctgtaatcccagcactttgggaggccgaggcgggcggatagcttgaggtcggcagttcgaggccagcctggccaacgtggtgaaacccgtttctactaaaatacaaaaattagccgggcatggtggcgggcgcctgtaatcccagctacttgggaggctgaggcagaagaatcgcttaaaccgggaggcggaggttgcagtgagcctagatggcgccactgcactccagcctgggcgacagagggagactccctctcaaaaaaaaaaaaaaaaaaaaaaaaatgtgaagggtaaactggagggaggcagagtgcatgcaatcaatgctgtgatctcagacaagagaatctgtaaaaacacaaacaggagagtttatttgaagattcaggatttgggaagctgaacacaggaagaaaggagatggtgcaacacacttctaagccttgctcaggacttgaaatccagagtgccttcagttaaaaactcaaacactgaccctcaaggttggaccctttttggcttgagaaaccactaatttttcagagatgggtaactgagaccctagagaggaagggaagatttgttcaaggtcacacaggtagtcgacaatagggctcgacgcccgggtccggctccgcgtagggcatggcgctgccttgcaaaacagccacacccgccagcgacattcacaacccaccccccaaccctagaggacagcggggaaatcccactttcagaaccgagaaactttttacagccttggaacacggtaactttgggaggagaggccacaccaggtctgtttccccgcgcgccccttctctcattccctattggctctctctaccaggggtaccgtctggggaacctctggtcaccttgtcctccgcgcgctctgtggcgaaagggacctgcgcaggcgcgtgaagggcgccttcagggcccgcgctttacgacacttgtgcggcagcggcggcggccacccggcgctccttcgcgacggttcggccgggtgccgctggcggccgttgccagggtaggggtcgctttgcggcatggcgatggcggagggcgagaggactgagtgtgctgagcccccccgggacgaacccccggctgatggagctctgaagcgggcagaggagctcaagactcaggccaatgactacttcaaaggtgcgcccgcctggcagggagggtggacagtggcccaggctgaggggtgccgggcccgcgcggaaccatagcaacgcggagctgcagcctgggcgcggggcagacactaccaagtgaccgggcgtggggaggcccaggatggcgctgccaaggagcgacatagggggcttcggagagtgatacctaggagtggcgtgcggagcgggtgctactcagtggagagactgaggagggcgccaccaattgtggggcgagagggggactggaatgagggcgctaccaaacgtgaggcctgtagagggcgctaccaggcagtgacatgtggtgggggagtgattgatggcgctaccaaatggggagtcctggggtgggtgccgccaagtggggggtagagggggcacagccccaatagagaaggcaatcgtgggggtggggaatggatcattagatggggggaacaaggaagtaggagatttgggctgacccgaggaaaaggaatgtgatggtgggggccttgggagtaagggtggggatccttaagaatagtatcacttagaatattgagagtcaagtgtggggcacccattcattcattaattcaacaaatatttattgagtacctgttatgtgccaaggactgtgcttgactttggggatatagcagtgaatgagacagatgtggccctgtccttagcttgtaattttgcaggtgaaccagacatgaaaaaaaaaaaaacaaaaaaaaaccatgtaaataagtaaaatacttaaattgtgatgagtgctttgaaagcaaaccagcagtgtgatgaagtagagaataagggttggaggctactttagatagggtagtgggggaaggccttactgagcaggaggcgtttaagctgaaactcacagagggagaactggagaggagtgttccagggaggtaaagcagcctgtgcaaaggccctgggatggggaatgaaagggtactggcatggctggggctttggctacttagggggagaccaataacaagatgagattaggacagaggccagatcatgcagggtctccgtgagtcattacaaagaccagtttggaattttttttttttttttttttttgagacgggagttttgctctttttgcccaggctagagtgcaatggcgcaatctcggctcactgcaacctccgcctccctggttcaagcgattctcctgcctcagcctcccgagtagctgggattatagacgcacaccaccatgcccagataatttttgtacttttagtagagatggggtttcgccatgttggccaggctggtgtcgaacctctgaccgcaggtgatccgcccatctcggcctctcaaagtgctgggattacaggcatgagccaccacgcccagccctacaagaagacacattaagtaaatgggccagtctggactggagaagaatttgggcgtgatcaaactatggttgggaatggatgagatcatctagtaagagggtctagaggggggacttaggacagaacccaaatggaagagggtgaggctaaggaggagcacttagtgaggtggaaaggaagccaggaaaggtgtcgggaaggctgagagaagggagcgcttctagaacaaggagctggtgcctttagtccgatgctgccaaggcaagcactggccattggctttggctccatggatgctggtagtgatgttgacaggagcagttattggggagtgatgggggtgatgcagccaggaggtgctgaagagtgaatgggaggggaggaagtggagacagcaaatgttaagtgttaggagtattggttctgaaggggagtggagaaatgggggagggtggtaagacgagaacgtgcacaggagttcgagaccaacctggccaacatggtgaaacgacgtctctgctgaaaaaattagttgggtgtggtggcacacacctgtagtcccagctacttgggaggctgaggcaggagaattgcttgatccttggaggcagaggctgcagtgagccaagatcacaccactgcattccagcctgggcaacagactccgtctcaagaaaaaaaaaaagagagaagatgcagtgtcagggaaagatggattttttgtaaggatggaagagagtagagtccaatagagatggagaattgattctgcacaggagaggggggacttgcagcagcaaaaccctggagaaggcgga

SEQ ID NO: 97649 - DNA, 56429 bp, Homo sapiens
  misc_feature (1)...(56429): n = A,T,C or G
cccaagctagtctcaaactcatggactcaagcagtcctcccgcctcggcctcccaaagtactgggattacaggcatgagcccccgtacctggcctgagttctgtattttgacaggcatttggtttttcaggggtatgtatttgtcaaaactcagtgaatttatacctgagatctgtgcattttattgtgtgtattttacattcttctctcaaaagaacaaatattaaaccttagttaatgatatgaagcattaagagggcagtggacagataatctataatttattttgaaatgcacaagaaaagatggcttgatggatatgggatacagccacacctgtgatacagcaggcatgataaaatgtcaatggtagaatctaggaggtggggataggggcgcttgttgtgaaatctttcaactttgctctatgtttgaaagtttttgtaataaagtgttggaaggactgtagtaaaattgttttttgtttgtttgtttgttttgagatagagtcttgctctgtcacctaggctggagtgcagtggcatgatctctgctcactgcaaggttcgcctcctgggttcacgccattctcctgcctcagcctcccaagtagctgggactacaggtgcccaccaccacgcccagctaattttttgtatttttagtagagacggggtttcaccgtattagccaggatggtctcgatctcctgacctcgtgatccgcccgcctcggcctcccaaagtgctgggattacaggcatgagccacagcgcccagcctgtagtaaaattgtttaaaaagatgatactgggccgggcacggtggctcacgcctgtaatcccagcactttgggaggccaaggcagttggatcgtctgaggtcaggagttcgagaccaacctggccaacatggtgaaaccccatctctactaaaaatacaaaaattagccaggcatggtggtgggagcctgtaatcccagcaacttgggaggctgaggcaggagaattgcttgaacctgggagacggaggttgcagtgagctgagatcatgccactgctctccaccctgggctacagagcaagactccgtctcaaaaaaaaaaaaaaaaaagatgatactgggtaccaagagggtgggggctggcaccatggggatctgagtattagggagaggagaccaagttcagttactgcagggaaaaatgcttattgagcatctactgtgtgccaaaccatgttctaggtactggggacatagcatcaaacaaaacacaaaaatccctgccctcatggaactgatgtcacaggtgacatggataagtgataaaatatatatatatatatatatatatatatatatatatatatatatatatatatagtggctgggcacagtgactcatgcctgtaatcccagcactttgcgaggccaaggtgggcagatcacttgagcccaggagttcgaaaccagcctgggcaacatggtgaaaccccatctctactaaacaatacaaaaattagctgggcctggtggcacacacctgtagccccatctactcaggaggctgaggtgggagaatagcttgagccgaggaggtcaaggctgcagtgagccaagattgcaccactgcactccagccctggggacagagcggggctctgtctgtctctctctctctctctatatatatatatgtgtgtgtgtgtgtgtgtgtgtgtgtgtgtatacgtgtatatatatatatacacacgtatatatgtatgtgtatatatatatatatatatatttgaagaaataaactacataacatgtcaagtgtaagtgccaaggtaatattaacatggtgtaaagtgggtgcaggggtgctcaaagaggatctcagtgagaaggtgacacaggagcagagagcagaaggaactgaggggcaagacatggggagacaaggtacagtgtgcagtaagtactaaggcacttaggggagcttggcccattggagagtcaaaagaacaatgcaggaatgggaggcattcagggccctactgctctgataaaaacgtttcgttttgctgtgggtgagatgggagccatgggttggttttgagttttcgtgtggatgttatctattgcaataaaacatgccacccccaaaactttgtgggttaaagcagtggcagtatattttttctcttgattttgcaatcaggactgggttcagctggctggttcttctgcttgatgggcttccattagggtagggatgtccaagatggttccttcacttaagatgtctggcacctcggatgggatgattctaatggctggggactgtctggcatctctttcttcacacagcctgtccacatggctgacttgggcttcctcataccatggcaggatcacaggggtcaggcttcttacatggtgttaaagcaaactaaatatggcccgagaaggattctatactcctatttttgagtccttgtggacaagctataacctagcttaataggcagacaagatcgaaaacctaattcaaactgtgttcaaataaggcaaacaccaacatgtaaccaatcctgctgtttctgtacctcactgctgatttttgtatgtcacttcccgtttttgtgtgtgtgtgtgtgtgttttggcgatggagtcttgcactgtcgccaggctgtagtgcagtggcgcgatctcagctcactgcaacctccgcctcccaggttcaaggattctcctgcctcagcctcctgagtagctgggactacaggcatgcaccaccacgcccagctaatttttttatttttagtagagatggagtttcaccatgttggccaggatggtctccacctcttgacctcgtgatccacccgccttggccttccaaagtgctgggattacaggtgtgagccactgcgcccagccacttccctttttttttaatctataaatttgttctgaccaggaggcatccctggagtctctctgaatctgctgtgattctgggggctgcccaattcacaaattgttcattgttcaattaaactttaaatttaattcagctgaagttttaaacaatggcggctggcttctaacagggaggcggtgaatcctgccatgtctcttaagggctacacctggaacttgtatcacatcatttgtgctgaattctattggtccaaccaagtcgtaaggctagcccagattcaagctgaggagaaagagatcccatctcttgatgggaaaggtagtgggctcatagggcaggagaactgatagcaatcgtcttggataccatgccccacagtgtgccctgtggcaacagctggcagagaaaagacctgaagagtctaaatctgtgtttctctggaatggacacaaccatctctgcccctgggacgccacaagagcatcagccaagggctcagctatgagatgggcacttttgtaatccagagatggcagcaacaatattcattatttttaactcaaggaggattaaattcagttcccaaattcatggttatggtttcagacaacaggattttcttttttattttattttattttattttttgaggtggagtctcactctgtcacccaggctggagggcagtggtgtgatcttggcttactgcaacctctgcctctcgggttcaagcaattctcctgactcagcctcctaagtagctgggattacaggcacatgccaccacgcccaactaatttttctatttttagtagagacagggtttcgccatgttggtcaggctgatctcaaactcctgacctcaagtgatccacccgccttggcctcccaaagtgctgggattacaagcatgagccaccgcacccagcccagacagcaggatttttgatgaaatcgccccagaaaactggagtcttgactccaaattagcctttaccttcccagggagaggacgagtggggacattattgcttctaaagtggggagctgggggatggggcaggggcatacaagagatggggacagggcttggtgtgggagggatatttgcagtgctgttgcctgggctcaccccacccccagcccctgctgtcacttacaaccttcggctggttaattacctgttggggccttcacttatgtacctgaaaatagggatctcgttctcttagcattgtcatgaaaacctctataagtcagtggttcccaatctggctgcacttttggaatcacttaggggaagatttgcaaaataccgatgccctggctccactcccagggactctgattccgctgttttggggtgtggcctgaagattgggatctttaagcactcccaagtgattctaacatacaagccaggctaaggaccactaggccaagccaccgggccagggcgttctgagccggcgctttagccagcggtcctgcagcgccccctggtggggaacacgagcgcgtcgcctgttgtctgtggaactctccttcctccctcctagccgcgtgtctcgggcgctcctctccctgcttgaaccgccggaggggcttgagcattcagcccctggggatggtgttgtagggaccagcgcgacatcgggtctaacccgcccgagggacaagggggtggcaatcagaggggccgacagaccggggttcgagctcttccccacctctgagcctcagtttcctcatctgagaaatgggatgaaaatttgacttcatgttgctccccagtgtcagccccgggagggtgcctgcccgacttccaccagggggccagaacctgaacaagagtggggacagttaggtgaggaagtgggatatatccaaacgtaaatgttttctatttatttatgtatgtatttagaaacggagtctgcctctgtcgcccaggctggagtgcagtggcctgatctcagctcactgcaagctccgcctcccaggctcaagccatcctctcacctcagcctcctgcccaactggaactacaggcgcgcgccaacacgcaagctaatttttgtattattagtagagacggggtttcaccatgttgggcaggctggtctcgaactcttgacctcaagtgatctgcctgcctcggcctcccaaagtgctgggattataggcatgagctgcccacctggccatgttttccatttaaaatcctcgttttagtttgcaattctctcccacccattctttggttttatgttttcctttcttcacattggtttcatttttgtgtttgtttttactcattttgcatttatttggttttggctacatgagaagctggtgaccctgtatttgggaagtccccaatatgtgaggattatactgaaggtgacacccaaaatttgggagcatgctgaggatgggtccttgcagagactgagggcaggggttgtcgggttcaaggtgtggccgtgggctcctgtcagctagtgtcacagtcacactaataggcacacacctacacacacagacttacacaggtgccaacacactcacaaaacacacaatcatgctcacactcctagtcacattctaacacacacatccagatacaccgacatgttcacacacacttgcacatccagcataccgattcacacacctttgcacacacatatgccacacccactgaaaccctctcacatgtccacacacaccatcaccccgaccctgacacacactcacacacacacactgacacgtcccctcccctagtccacccctaatcctggccacacaaatgcccattctttctccccaggatggggccaaatggtgttttcttggtcatccttggccgacctggcggcctgtcccaggcagccggacttactggaatctctgggctgtggtgtgcacaggagaactccagatggggcccccagtgaggaaggcctgaatgaggtggggcatctggctggagaccatcctttcctcccttagaccacaagagggcgaggccctccctctcctccgagccaggggcttcgccctggtattcccccacccatggccccaccccttatccaggcgcctccttatccccctctcagccctaggtctcccatccccagtcttcccccatcccacccatttcacccatggcagcacaaatttgcccctgttcctccccctgcctggaacctgctatggctccccagtgccctcaagacaacacccagcccttcaccatgtgctccagatctggaaagaaagctctggccaacccttctccctggtttcatccagtctaaagcacgtggactgggtcgggtgtccccttggggttgtcagttctctctcccccactggactttgagtcccaagagggcaggtccagtattgtcatggtcactgctgggtctccagtatggagaaggggctcgagaaggtttattaaacaaaagaaagggccgtgcgccgtggctcacacctataatcccagcactctgtgaggccgaggctggtggattacctgaggtcaggagtttgagaccaccctggccaacatggtgaaaccctgtctctactaaaaatacaaaaaatgagccgggtgtggtggcgcacgcctgtagtcccaactactcgggaggctgaggcaggagaattgcttgaacccaggaggtggagattgcagtgagccaatatcgtgccattgcactccagcctgggtggtgacagagcgagactccgtcttaccaaaaaaaaaaaagaatgaattcacgtaactgtttaaagggtggatgtattttccttttcccagagctgtggctcctcatgcccactagagggcagaaaaaatctagaattcaatgcatctaccatgtgtcctccctccaccaccaaaacgtgccccctccgcccccacctaaggagaaaggaataacaataacaatgtgaataactgctaatatcagccctactgcttgtcagacccctgttaagtgcttcacacacctgatctctaaatcaactgctagatgagacccagccaaggtagaggaggaggaaagcaaggatcagggagggtgtttaattttcccaagtcgcacagcatccaaactgcagataaacttccagctcaagcctctgtgacttcacagctctttgtcctgtttgtggcaaagtttctcaaaagagagagtggtgactgggtgttagaccccttgatgaggatggaggggggcagctcatgcaaagggggcctctagccaggcagccctccccactgccactgcccggggagcctgcacactttaaggcagattcttcatagccttaggggctaacctctgaaagtgtcacagcagcccagggatgcgggttctattattttatccctgtgatacagattaggaaactgaagctcaggaaaattgagggacctgtcctgggtcgcgagacatggaggtggcagaactgagatttaccctgcaaggggccttgccagggcaggacacagagacttcaaatgctaggaggaggaaatggaactccttccccagaagagggaaaagtaactacagggtgagggtctgggagaggagaacaaggacctattttctgatgaggaaagggcaggcttttgtaggtctgtatcccaggtttaggggagcccagggaacctcaaggtcttggaaattcttattttaaaaagaccctgaggtcaggcgccagtggctcgcgcctgtaatcccagcactttgggaggccaaggcaggtggactgcctaagatcaggagtttgagaccagcctggccaacacggcaaaaccctatccctactaaaaatacaaaaattagctgggcatggtggtgcacacctgtagttccaactacttgggaggctgaggcaggagaatcgcttgaacccgggaggtggaagttgcagtgagctgagatcgtgccactgcactccagcctggggtgcaagacacagcaagactctgtctcaaaaaaaaacaaaaacaaaaacaaaacaaaaaacaaaactgaagggtgcagactgaggaagagggaagtaacagtcaaattgtgcatttattagaaaaaacaatctaggtccctttggggaggctggaaaaaatgyccaggtaatagtaagtgaagaaaaaaaaaactggtagaaatatgtacatagaatgagtccattttggttaaataaataaattcataaagctaacatttattgcctcctaagacaggccagggattgtctgaatattttacaagggcttttgtcactaatcccataactctgaacgagtcccattttacaggcacagaggttgcacagagcccaggaatggcaaagtgaggtggcaaaccaaggtcttctgagcccagagcccaggctctcaacccctgtgccctgtgcagatcaccctgaacttgctcaatgtaccagccgtcatttcttcatagcagccccaaataaatacctaactgttcaattcctcatcaggtgaggtctaaacaacccaagtatttatgtcctaagaacttagtagccatggccgggtgcagtggcttggcctgtaatcccagctctttgggaggaaaggcaggcggatcacttcaggtcaggagtttgagaccagcctggccaacatggtgaaacctgggtgtgatggcgggcgcctgtaatcccagctactcaggaggctgaggcaggagaattgtttgaacctgggaggcagaggttgcagtgagccaagactgcaccactgcactctagcctgggtgacagagcaagactccatctcaaaaaaaataataataatacacttttttcaatttatgtgatgaaaatatttgatatgatgaggagacagttttcaaaaacacttttggtagcaccaaaacaaagtttgaagtcctctatcctggggccttgcggcttcttttctttcttttttttttttgagatgaagtctcaccctgttgcccaggctggagtgcaatgctacaatctcggctcactgcaaactctgcctcccgggttcaagcaattctcctgccctagcctccctagtagctgggattacaggagcatgccaccaagcccagctaattttttgtgtgtctttagtagagatggggtttcatcatgttggccaggctggtcttgaactcctgacctcgtgatctgcccgcctcggcctcccaaagtgctgggattacaggcgtgaaccactgtgcccggccgggccttgcattttctataaatgttcttacttagtttaaagcgagacgggagcgcaggacccagtcctgggaggaaatgaagtctcagagggaactggcaggcaaagcttataaagaccacagtgattatgccaaggtcaaggaaagggttggggagggcggggcaggctccaccttttgagcagggcagcggggaactcccccagccatctctgcgccccacagggatactcacacattaacacgcgtgtgtacaatgagactgtctgccatacaaatggcatcgtattctacgcgctgaggactgctgtaacaaactatcacagaatgggtggcttcaatgacagaaattaactttttcacaattctggaggccagaagtccaaaatcaaggtgttggataggttggtgtctcctgaggcctctctccttggctgtgcagacggccgtcttctccctgtatcctcacatggtcttccctctgcatggggctgtgtcctggtccccttttctcataaagacaccagtcaggttggattaagggcccacacatgggacctcattttactttttttttgtttgtttttgaaccaaagtttcgctcttgttgcccaggctggagtgcaatggcatgatctcggctcactgcaacctcctcctccctagttcaaacagttctcctgcctcagcctcccaaggagctgggatcacaggcatgtgccgccacgccaggcaaattttgtatttttagtagagatagggtttcaccatgttgggcaggctggtctcgaactcctgacctcaggtatctgcccgcctcagcttcccaaagtgctgggattacagctgtgagccaccaaagcacccggcctcattttaccttaattacctctttaaagacccccatctccaaatacagtcacattcagaggtgctgggagttaaracttcaacatatgaatttggggatggcgatagcatagtatatggtaactctatgttaaacttccagaggaactgtggccacaggtaactctttaacagaaacttgcctgtgttttctttgtactcattctgccttctggagaattcctaggaacccggacaaaggtagttgggcacagtggcacatgactgtagtcaaacctactcaagaggctgagatgaagaatgccttgagccctgtagtttgagtccagcmtgggctacacagcaagacccccatctctaaaaaaacaaagacaaagctaacctacaaattgttctcaaatgtaaagacacggaggctgggcatggtggctcacgcctgtaatccccaggccaaggtgggaggattgcttgaggccaagagtttgaaatcagcctgcgcaacatagggagacccatctctataaaaataaaaaaattagccaggtgtggtggtgcatgccttcggtcacagctacttgggatgctgaggtgggaggatcacgtgggcccaggaggttgaggctgcagtgagctgtgatcgtaccactgcacttcagcctgggtgatagagcaagaccctgtctcaaaaaaaaaaaaaaaaaaaaaaaaaaaaaaagacatgatagaaatatttaacaattacttgacttgatttactatgaaatatttaatgatgtattagttaactgtgattttgccagtttcttctgtattttgaaactgatactttttttctggttcaaaaatttttggaagktgcttaagaaataactgttcctccccactgggcctgtggagacctgtagacaaagtactaaagtaactcagcacaaatgtgcaaagtctgtaaatttgggtctttgattttcatagctatgaagagctcagcatgactcttggtggttaagaggcaaattttgctatatttcctcttcctgctgcagctgtactattaataaaatcattctgaacagctttcctgaaatgtaaaaataagccaagatgtctattttgtggatttttttttattatatgtataagcacaggaaaaaacaaatctggtaggacctgcatcaaaaggttagcagggttcctctctgggctgggggcttaagggaggggtgtctgcttcagccatatattgctgttcacaacccgctagagtttaggggcttcaaacaatgacttactagcattcagagggttgactgcgtggttctgctgctggtctctccctcggtcacttgtgtggctaatgtcagctggtaataggctgattctcccccacacagcctctctgcattcacctgggctttcactattttgtaacccagctttagcttccttgcaagatggcagctggcatgcamgtgagtaagagtgggagtctcctggactcttaaggcctaggcttgaaattgacgcatcactctgctacattctattggtcaaaacaagtcacgaggcctgcccagaatggaggggaggggaagtagacccccctggtgatgggaggagtgatgcgtgtgtacagggaagggaggaattgttagtagccatctttgaaggctgctgacctccgtgtctttctttctgtgtttaatagtatgcctagaataataataccacctagaatattatataataatgcctagaatattatagaaaaataatatcagacgtattatttttatgatgatagatatttttttaaataatgcaataaattgtgggaaacttgttggttggaccaagaatctacagaaataagtgaaacctggctggacgcggtgactcatgtctgtaatcccagcactttgagaggctgaggtgggcagatcacttgagatcaggggttcaggaccagccttggccaacatggtgaaaaccgtctctactaaaaatacaaaaattagccaggcatggtggcaggcaattgtaattccagctacttgggacgcagaggtggaagaatcgcttaaacccgggaggcggaggttgcagtgagccgagatcgcgccagccactgcactccagcctggacgatggagcgagactctgtccctgtcccgccccctccaaaaaaaagacacagcaaaagaaaagacacagagaagaagagaaggccagagactggagccaagagacatcaagagcccccagaagctggaggaggcaagaaaggattctcccatagaaccttcagagccaacaaggccctgctggcatctttgttttgaacatctggcctccggaactgtgagaaaataagcgtctgttatttttagccaccaagtttgtgagaatttatgacagcagctctagaaaatgaacacagacatagacagagagagggagactgatctgaatgtagatggagatgtggatatagttgcagatagaggataagctaccaataaggatatagcagcccctatggtgtaggtatagattaggatagagctgtgggcgtagacatggatatagacataaacatcaatgtagacatagatattactgtggatatagacatagaaggagataaaatagaccttgaagggccgggcacggtggctcacgcctgtaatcccagcactttgggaggctgaggtgggcggatcacctgaagttaggagttcgagaccagcctggccaacatggtgaaaccccatctctactaaaaacacaaaaattagccagacgtggtggcccacgcctgtagtcccagctactcgggaggctgaggcaagagaatcacttgaacccgggagacgggggttgcagtgagccaagatcgcaccactgcactccagcctaggcaacagagcaagactccatctcaaaaacaacaaacaaaccgaaaaaacagaccttgaggaaagcttgaggaaggaatggggtcacctgggctaactatgggccattgccaacaggaggtcacagcagatgtcatggagacagcctcctacaaacgctccacagctaagctcttcaggttttctggaaaatcccaagtatcagaaattgctttcttggttgggcacagtggctaatgcctgtaatcccaacaccttgggaggccaagacaggaagattgcttgaggccaggagttcaagaccagcctgggcaacatagcaagacctgtctcttaaaaaaaaaaaaaaaaaaaaaagctttctttcactcctccagtcatcctgctcttttctagtttctggataatcaatttgacccccaaaatgtgaaaacacaattcattgttttcagtcaaaagttgtatttttcttttctttttgagacagagtcttgctctgttgcccagactggagtgcaatggcgtgattatggctcactgtagccttgacctcctggcctgtagtgatcctcccgtgttagtctgccaaggagctgggattacaggtgtgagccagggcacccagacttcagtatgaagttttctctcccttctcttacctttctcatataaatcctgttttgcttttgaacgttgacaacagtcctatgaccatctccctcccctttgcatgccagtgtccaaaacaaaatcagatccaatgaataaatatttaaaagtttgttgtcattaaaaaaaagtggggacagggcacaatccaggagacctcaacccaggtagtaagaagctcagaggcatgttgttacaggatggctgagaaagcaaaaatcaggaagtggtttaacctttacagtgactgtctatacagtggaggtttccagattgcacgggactggttaaaagcaatcctcttatatcatttggggaaggcaacttaagtttcgtttatgattatcagaggcatttgtaagaaataacctaagctggctgggtgcggtggctcacccctgtaatcccagcactttgggagactgaggcagacagatcacttgaggtcaggagtttgagaccagcctgagcaacatggtgaaaccccgtctctactaaaaaaaaaaaaatacaaaatacaaaaattagcagggcgtggtggtgcgtgcctgtaatcccagctacttggcaggctgaagcacaagaattgcttgaaccccggagatggaggctgcagtgagcagagatcatgccactatactccagcctgggtcacagagcaagattccatgaaagaaagaaagaaagaaagaaagagagaaaggaaaggagaaaggaaagaaagggagagagatagccgggcgtggtggctcacgcctgtaatcccagcactttgggaggccaaggtgggcggatcacgaggtcaggagattgagaccatcctggctaacatggtgaaaccccgtctctattaaatatacaaaaaattaggtggcgggcgcctgtagttccagctactcgggaggctgaagcaggagaatggcgtgaacccagaaggcggaacttgcagtgagccgagatcgcaccactgaactccagcctgggcgacagagccagactccatctcagaaaaaaaaaaaaaaaacaagggagagagattgagagagagatcgagatctaagttgagtttcgcttacattcaaaagtcagagtaccttaggttttgcttatgtggcctgattttgtcttcttggggaattctcagtccggatccaccccccctagttttgtgtgtgtgtgtgtgaaacagggtctcgctcggttgcccaggctggagtgaatggcacgatcgcagctcactgtagccttaacctcctgtgctcaggtgatcctgttgcctcagcctcgcaagtagctgggaccacaggcatgcaccactttgtgcagctaatttttttttttttacttttatagagatggagtcttgccatgttgcccaggctggtctcaaactcctgggctcaaggatcctcccaatttggcctcccaaagtgttgagattacaggtgtgagccactgcgcctggctccccccattttattttaacaactttccccttttgacatagcaagctgagggggtaatgaaatcgtatagcattactttctgggagtgctattggctgggacagatgggtgtatagtcatttttgatagctgcatagtcatcttagacatatgtggtagagtccttaggttctccaagttgtctaatgcagatgggtgtcattagttgcatcagtggctgttgagaggcattggaaacccttaagaggatgcaactcccagggaggttaatatcatgactaggaggagaataatatagccaagggttggaaaattcaccagaggagagattcccaggagccaagatgtaaccaactaaataaataaatggaaaaagtatcacctatctgataagatttacatctgttctttaaaatcctctgaagtgtgggcaaaaattcttgatatattaacacagaaatgacagcttcatkcattatacctcctttttgggcagttagagtagctcagactcatayattttgtgaaattattgaagcaaggctagaaacctcggtttgtaagccttggaggaaattaacagtgtcattgaagtttttttctaaagttttagagcatttataatagccccttccttccttccttctttttctttttctgtttctgtttttgttttttgatatggagtcttgctctcttgcccaggctggagtgcaggagtgcagtggcatgatcttggaccactgcaacctccccttcctgggttcaagcaattctcctgcctcagcctcccaagtacctaggactacaggtgtgcaccaccacacccagctaattttagtatttttagtagagacgaagtttcaccatgttggccaggctggcattgaactccttacctcaagtgatccacccgcctcggcctcccaaagtgctgggattacaggtgtcagccactgtgcctggcccataatagccttttctaaatcagagacaccaatacaaggaattggagctctgtccaccaaaggaagtcagtgtcatgtgtagtgagagggttggtgcttcttggatttctctaacggtgctatcttctgaacaagtgagccaaggttggtggctttatttgtagagatagtttattgtatctgaatattgggagggattactgccaatccataatgaccacgactcctgtttggtgttggctgttgtggctgcccttctcctgtcattttgctcagtgcccgygcctggcagtgctgtgatgccatcccagggttcccgggtgccyggtacctgacaggtgcattacctggtaggcgcatttctggtgcagtttcttctggtccttgtaccactgcatgagccccttcatgaaggtgattgtcactttgtcgtcctcaagcttgggtccgctgtactcaccctcgatggctggcatgtgaacaggggagacacgagagtcagcgaccacggccactgtaagggggaagggggtcttgctcycagggatgaggtggacctggctctggacacacagattgagagagggacagagcgagtgaagagtcccctctctggtcaggtctggcccagaggcctcttcctgacctccttctcttccttcacccgcccccctttaccctattcagttttatggcacttagcacgattcattttgtgacttgttcatcatcttatctgcctcctagaatatcagctccatgcggacaggaagggttttgttcatagctgtacccccagtgcctaggacagtgcctggcacataggagatgctcaataatcatctgtgggatgaatggctggaccttctcagcacctagaggtgaaccagacacagcctgtgggggcggggctactgccggcagagagggagggaggagaggatgacagagtggccaagaagccagcatggagaagggcccgggcaggggtgatgctggtgggtagggaaggtgtattagtccattttcacattgctgataaagacatacccgagactgggtaattcataaagaataagaggtttaatggactcacagttccatgtggctgaggaggtctcacaatcatggcggaagatgaaaggcacgtctcatgtgccgacaggcaggagagaatgagaaccaagtgaaaggggaaaccccttataaaaccatcagatctcgtgagacttactcactaccacgagaacagtatgggggaaactgcctccacgattcaattatctcccaccaggtctctcccacaacatgtaggaattatgggagttacaattcaagatgagatttgggtggggatgagatttgggtggggacacagccaagccatatcagcggggtgttgcagctcctgacctcgcccattgggaatcatgagacggagctttgggctgcggatggagcgccctggaacrcaggcagaggagcgacagacagcagcctgggggcagaacaaggggctacccttgagcccacccccacccccagggaatggagaaggcccgtgtggaatgttctgggctggagcgtggagcatccaggcctgactcactcatgctctcgatgtccagcgagtccaccacggagcgcttgtgctcgtcgccygcgatggcccgctcaaaggccttctgcttcacgatcttgttgcactcctggtatttcattttggcatccttgtcgtggggcttcaccttgaccacctgggtgggagggaaggggcgtgcacactgaggccgaggtgggggcacagcggctgtccccaggctgcccagccctggattccatgaacgcggaagtcaggcngcccgggcaccagtgctgatggtgcaaccctggacatgtttaacctccaagtcttgstttctgcaccccaaaactgtccatagctaagctgctcacaccggcrcacttcatcaaccttagctataactacattaaaatcaaacaccttgcccgtytgaggaccatgggctcagctcctggtcccccgtgggaaccagtgcaggcagcgacaactccaggcttcccagccttggactccaggacttacgccagctgcccctcaaatcctcaggcctttggcttcggactgagaattacaccgttggcttccccagttctgaggccttcggacttgttctgagccacactccctgcatcccagggtctccagcctgcacacagcctcaggacttctccgcctccataattgaatgagccagttgcccaataaaccccttctcctatctctgtctacacatatcctgttgattctgtctctttggagaactctgattaatatgcttcctctatgaaacaaacagggctgttcctagccatctcccagcccctagggagatgaaacgccrtggcatacctggccaccgcagggctcaattaagatgagctgtaattattattattattattactttgagatggagtctcactctgtcactcaggctggagtgtagtggcgcaatcttagctcactgcaacctccatattctgggttcaagcaatcctccttcctcagcctcctgagtggctgggattacaggcgcctgacaccacccccagctaatttttgtatttttagtagagatggaggtttcaccatgttggccaggctgatctggaactcctgacctcctgcccacctcagcctcccaaagtgctgggattataggcatgcgccaccgcacctggccaaggtgagttgtcattattcttcttattgttattcccacagccctggagcctggggctctgtgccttctactgcctgccagacagcgaggggcctgggccagcagggccgttctcctccgtgccagctcagtgccaggcccctctggctgcctgcccagccccaggactcctgagagcctggatccggggtcctggggggtaaggggcccctcccaaaggctgctgttgcccggaactctgaygcagcctcagcagcaacccccaagcaggctgctcccatcccagggaagtccaccttccaccccatcacccagctgagactgagcctcatcctggactcctcccgacccctcagcccccacagcccggcagtcacttcacttcttctgccaagtcggcctcctgaacatctctcagatccagccattcccttctcaccctccagccccacccagccctgacctggcctctcctgcccacgttcctggctcagcctccacctggcctcacagcctcttgtcctgcccttccagaggggtgttcctaaggcacaaacctgaccctgtcctttccctactcggaacctcccagggctccccagagcctcccgcagaaagccctggctctccccacggccctgcgtgatctgctccctgcagcttcatcataacccccacgcacacacactgcagccccactcaccgcctccatgctaggctccgctaacctctggaactttgccaccaggttctttctgcctgaaggccaaaaccatcaaccccctagggagacccccaggcatgcrtccagagacccagcatcccccatccctcgtccactatgtcaccccactgtgagagctgaaaggttgtttctgcccattcagggacagagcctaccccaggaggcccactagattctcaggcccaccagggcccatgagtggcaggacccacactgggggactgggagctgtgaccctctaggctaacggggaactatgrgagctctgcctggggacacagggccccaggcctgggccagttcaagagatgagtggctggcagctcccagcagatcaccaggctggggacgaaccctgagggtgagagagactcctctcccaaactaggagtgggctagggtcctggactttgccccaacatccccctcccacgccctgcacgccttcagcccacaccattccacgctttcagcccacgccttctgcggcctccccgtcgggtccagcctcagcctcacccgtcccattcatccacatgacatcgcaaacttgaccctccccctcccttattccaaaattttctctagttccccagtgccccgggaacaagtcgggttcctatgaagccctgtatcccgcagtcccaccttctccccagtgttaagctctactcaggtggggttcctctgcctccccctaccgggctgtaaaccccccgggaaggtaggacctgggctgtttcagtccccatctaggcaggatcagaccctggtgaatgcatgtggagggaagaaagggaaagaaagggaggaagggacagaataagaaggggagggagggtggtgccctttaaaatcaaaacctctggtttcatctttcttccctgaactggctccccacgcccaccagagggcgctctgacccagcaaattcctcatacagcaacagcccgttctacacacaaaagggaattatgaaaataaggattgacaccaataatcgatacttaaagccctactgtgaccagtaccwatgctaaattatccacgtgcctaaatcaacacagcaattctgagaatatcttataaatgaggaaagtgaggctcagagaggtcatttaactttcccagtgtcacacagcacataagctgcagagaagcttccagctctggccttggtaaccccacaaccttccgttccttggtcatagcctgacgtgaccaaaccacaatgccctctgtgcctggccctgccacctcctgcccaacccccatcccgaggctcagccacacccttccacccccagctccttagacatcctgttccccatttagtcactggaatcttagcccattggctgcctcgaaagcacttcttccctttccctacccccacctcccacaaatggtcacctcctcccttcagctcaatgtcacctcctctgagtaagcctgtcctgatccagggttagctccatctcttccgactcacctcccctaagaatccaggctttccctgcgctccaggaggcagggcttcagtcatcatcgtgtccccagagccctgcacaggcactacagaaagactgaatgaatgaatggatgagtgaagtctacggggttaaataaatgaacactcaatgagtgacaccctctccctctccctcagccagaaattgagacattctccaacaaacacccacagccaggaagagaagatcccggacccgctagccaagagtgcacgcttcaggctcccaggacccccaaaattcatcctgctgaggctgtcgggggatgctgccaggactctgttggaagccaaggccctagggctcctggagagggtcccatactcccttcagtccctccccaggccaggtacagtgagtctcactaatgccatcatgcctttagggcagagtctcctgctttccagcccagagtccacttccctctcctgaatgattcacctccatttctctccagagaatccccctccccactctccttccaggtgactcctacagggctcacccaatcccctgcccacccaagcctggccagtcagtacgcttcctccctccctggtcactgtgattggggcaggggcaagcacatgatccagttcatccaataggagtcagccctgggtccagggctaaattaatgaatgaaggaaccctagaaccagccatgcctgaagccaaagccacgctggacttttttttttttttttttttttttgagacagagtctcgctccattgcccaggctggagtgctgtggcgcgatctcagctcactgcaagctccgcctcctgggttcacgccattctcctgacgcagcctcccgagtagctgggactacaggcgcctgccaccaggcctggctaattttttgtatttttttttttttttttagtagagacggggtttcaccgtgttggccaggatggtctcaatctcctgacctcgtgatccgcctacttcggcctcccaaagtcctgggattacaggcgtgagccaccgtgcccagccaaccctggtctttatagtaatatgagccaatgaattcctttttcactaacctgcttaaacatggctaacttgggtttctgtacttgggacctaaacagtcctgtgtatcccactcctcaaagcattctctgagsccccaagggaagcagggtggggggtggcttctcagtgtcctgccagtcagtacatctggctccaaatgctggaccaggagttagggggagagggaaagggtcttctggagtttttagaccttggcaccatcatttgccatattcctgagtcttttcaccttgttcctggggctctgggtctcttgtcaacagggaacaagatgacagctgcctggtagagacggtatcaccatccctggagcagatctgtctggcaggcatattctcaatccctgcatttgcaggacagacccaagcttgcacagaggtcagaccagcagcttagtcatggggtgggctgaagatacgaaacagctgatttttctctccattatgttgtccaggtggaagaagggatgaatgaatgaaccctggggctcatcctagggcctggggcttggctcaccatgacagtgttcccagacacggggtgcagcccaggaaagaactgaggccaccctgggggtgctggtgggacagttagcaagacatgaaagggacctcctgggtgtcatgacatgataatttgcaggtgtcccaggggttcttcctgaagcccaaagattcccacctccctccaccagcaagtcctcacctgagcaccccgcctacttcccactgcacagcaggctccagcagggtcatggtagcagtggctgcccagaggtcgtggtttttcattttttgttctgttgcccaggctggagtgcagtggcgcgatctcggctcactgcaacctccgcctcccgggttcaaatgattctcctgcctcagtctcctgagtagctgggatcacaggtgcacaccaccatgtctagctaatttttgtattttcttttcttttctttttttaatttttgtgttttcagtagagacagggtttcaccaggttggccacgctggtctcaaactcctgacgtcaagtgatccgcctgcctcggcctcccaaagtgctgggattataggcatgagtcaccgcgctcagccagttgtgattttttactttattttatttatttatttatttatttatttatttatttatttatttatttatttttgagacagaatttcgcttttgtcatccaagctggagtgcaatggcgcgatctcggctcgttgcaacctccacctcccaggttcaagtgatgctcctgcctcagcctcctgcgtagctgggattacaggctcccaccaccacgcccagctgattttatatttttagtagagatggggtttcatcctgttggtcagactggtctcgaactcctgagcttggatctgcctgccttggcctcccaaagtgctgggattacaggcatgagccaccgtgcccggctggtggtagtttttttacctggatagaatctgtgcccctgcatcaggcccagcccgccgcacaaccttcactcagtctctgtttcacctggcccacactgggtcctaaacatcaaacttaccctagatctggagcctgatgccccagagggaggcccacccagtcccactgactaagcctggctctctgtgtgaggcctgtctcccagagtcacgaaagaccccagtaaacaaacaacatgcatagtctcgttttcagtgggcttcttataacaaaaaatgctctgtccctgcaacagcctgaaaacggttgtcatggaaacagcagtagccaatggaggagggagagacaggcccctcccagagcccaggcctcctgcggtgggtgatggggcacagaagaaccatcargattaaggggcaacggggaggggggtgtccccatgtggctggagcgggaggagtttcctcatctggtagctctgagagggagccgctgctctcaaagggacccatgagcatccctggagaacagatccatagtctcctgcggatcctcagacagctctggggaggggtcctggggaaaggtcactgtgaacagctggccagcaggcatccaggacgcccgagccctcatccccactccagcattgccacattcactgaaactgggactctaagccctgcgggtggcttgccagggtgtcattgacaccgtgcactgcagtccatccctatctcaggctccctcctgccccaagatcagtgcccagtgggcggcaccatggccatgagccttttgcaggactagtgccaggggcctggacatggacgcgcacagggccctgctggtcaccgggatcctggagggcctggagcaggtggatgttgaagccgtcctgcagtcgaccctcctgcccctgggcacgttcgggctgcaacacatgaagggcttgatggataagaaggcccaggccgccctggtggagtttgtggaggacgtcaatcacgctgccatccccacagaggtcctgggcaaggatgggatctggagggttctgtggaaggaccatgcacaggacacgaggttcctgaggcagatgagacgcctgctgctggatgatgggcccatgcaggccgtggtggctgggacccycggggagrtgcccacccctcccgcttcaaagacccaggctgaggggttgggacagtcatggggaaggccggtgcccctcctggggctacaagcgatagtaacaagaagagtaggggtcacagaaatcgagccggaagctaaaagagggcccgagggacatgtccatttcccttggcaaagaaggaatccaaggaagttccccaggagagcttggacatcaagatcgaggaggcagatgagggggcttgagcagagatgacaatgacagcaggctgtacacagcgctccaggcagcagccagggagcaagttcacaagaagtgraccctctgaagccacaaagacgaggcaggtggtcctatggagttcttgsccctgatgaccaggacagacaaagccaaacaggagatgatggaagaaagccctctgatttgatgcacttgaccatcaaagaaggcaggagcagtgactcccatatggtggctcttctggccaccagagacatacctgaatgagatgctgaagggctgtaaagcttcagaaagtgggcgggtgcaaccaccaggtcacagagcggggctggaggaccctgagttcctgactactgyggcctgtaccagcccttcagacaccaaaagctgccaggaggtgttgaaaatcgcttctgaggcggggtgcggtggctcatgcctgtaatctcagcactttgggaggccgaggarggcagatcacctgaggtcaggagtttgagaccagcctggccaacatggtgaaacyctgtttctactaaaaatacaaaaattagctgggcgtggtcgtgggctcctgtaatcacagctactcaggaggccgaggcaggagaatcactgcagcctgggaggcagagtttgcagtgaaccgagatcgcgccactgtactccagcctgtgcaacagagcaagactccatcaaaaaaaaaaaaaaaaaaaagaaggaaggaaggaagraaagaaagaaaggaaagaaagaaagaaagaaagaaagaaagaaagaaagaaagaaagaaagaaaaaattgcttctgtgatcgactctttgggctggaggaatgagaaagaaaaaacgatgccctctcgcaggtcttgtctgtcctgtccaaggacacygtggtcccgcggaaagcctgagatgacaggaaccttctggagtgcattttcaccttggcgcagccagaaccccctccctggaggaagaaggctgagcctggcctcctcagggtctggggcgaggattaaaagagacaaaaaggacaaaaagagcgaagtggctcctggagctggtggtgcgcatctggcggctcaggcattgctgcagccgggagcaccacctggggaagagggaaagaggaaaagsgtggggaggtgggaaattcaaatacaccaaaggcaaccaagggactacgcagctttccaggctgccagtgaggacataaagtcgggaaaggcagctgcaggggcagcagtagcagagttcgaggacacagagagcaaggcatgggagcctgagggcaaggcgtccaggaagcccctggccaagagggcgcacacggccccccggggcctggtcttcaactgcagacacaagtgattctcccgcctcagcctcccaaagtgctgagatgatagacgcaagccaccgtgaccagtctggtgtccacttcttacttgtcccattccttggtctgaacacttaggttccacccatggtttcgtgtttggctcatctgggcctgctcagcatatgtgaacttcaacctgggggtccatggcaactgaaaaagcaactcaccattttattccacaaagttgaaccggattaggctggttctgaggttacatgaacaacaagttacctgctgtgactgtagtcccaactcactccctaccttggagggctgtcactgtgtttatctcagtaacaaagacccctgaagtcccagtgccttgcaacgattaaggtttcttttcttttytttcttttctttcttttcttttctttcttttttctttttgagatggagtctcactctgtcacccaggctggaatgcagtggcgccatcttggatcactgcaacctctgcctcccggattcaagcgatcctcctgcctcagcctcccaagtagctgggattacaggcccacgccaccacgcccagctaattttttttttttttaagtagagatgaggtttcaccacgttggccaagctggtctcaaattcccgacatcaagtgatctgcccgcctcagcctcccaaagtgttgggattacaggtgtgagccaccatgccaagcytaaaggtttattttcacatacatgttggtagtagtggctgtgggtcaggcagaagggagagcccctgtttggatcttttctgcaggggctcacagcatggccactcatacaacacagaccaatgcaagtcgcaagttgcctctttggggtaagaatgcatcccctcccgcaggggtaccccaagccacatggcgacagtcagggacctatatcctcctacagggaggcagcgaatggaacaacaaaataatctaacacatcgcccgcccccccatcagaggcaacacctcttcccatgtggctgatgagatcttgtctcctccaccagactgtgaccaccgtggggacagattttgttcattgttgtgtccccagtgcttggcatattgtaagaactcaatgaatatgtgttgaatccatgaataaataaacaagtaagtcttgcttttctgtctcatatctgactctccccaacccctctccccaactcaggcttcctagactcaaatcctgaatccactgcttaccacctgtgtgaccttggatagatacttaacttctctgggtctcaatttgtttatttgcaaagtgggaaggatactattttgtgctttatagggttgttattgtaacttatacacacacacacacacacacacacacacacacacacacacacacaccctgtgcctggtatgtagagagtcttctataccaattagctgttgtgtttgtttgtttgtttgcagaggagggacagggtatcactctgtcgctcaggctggagtatggcagtgcaatctcagctcactgaaacctctgcctcccaggctaatgtgatcctcccacctcagcctcccaagcagctgagactacaggctcatgccaccacgcctggctaactttttgtmtagacataggtctcactacgttacccaggctggtcccccaaactcctggactcaagcaatctgcctgcctcagcctcccaaagtgckggattacaggcgtgagccacgcagttattgctgctgttgtcactgtggggaagtggccaagggcacaggtttggagccagagggtcctggtctgagtctcactctgccacgtgttatgtttggcctcaactccctgagccttaacgtcctcacctgtaaaactcaacctcaggacattcttgtgaatttcaggcgtgattttttacgcaaagcatttagcatgcccctggtgcgatgtaaacacaagccatagctatgaggatgtaggaacactgtgggaatcctgcgtgtgttgatgactgcgtgtggagcgcccctgctggacaatcacagaacagcacgactgccctgaccggagacctctctaccccagcatcctcaactgtaaaattataataacagtaatgccaatatgagattgaggattcgttgagttaatacatgtaaagtttctcgagtagcatgatgggttaaagatgagtacaaattccttatccttctccccatccagaggtggagtttatagaatgagatggaagtaacattgttactgatgtgggatgtagacttcaagaagactggcagcttctgcttactgactcttagaacacttgctgttgggacactgtccctgagaacccagccaccatgctgcggaagctcaagccacatgcagaggctatgggtagttgctacagttgacagccccagttgaaatcccagccaatagtcaacatcaactggcaggcatgtgagtgccccatcttgggtgttccagctcatcttgggtgttccagcccccatgtgactgcagcccaaccaacattgcaggaagcagggaaaccgtcctgttgagccctgttaacccacagaatcgtaagagacaataaaataattattgggttttttttttttttagataaggtctcactctgtcaccaargctggagtgcagtggtgcgaccatggctcactgcagcctcgaccgcctggactcaagcgatcctcccacatcaatctcccaggtagctaggactacaggtgtgcatcaccacacctggataatttttctgtacttttttgtagagacagggtttcaccatgttgcccaagctggtcttgaactcctgggctcaagtgatccacctgcctcagcctcccaaattactaagattacaggcgtgagccactgcacctggtcaataattattgtttaaaccacaacattctggggtagtttgttatgcagcaataaagagctgaaacaaataatatctagaacatagtaacaataagctgctattattatgtcattcaatcttcacaacaactctgtaagrttgacatcaatagtacctgtattagtctgttttcacactggtgataaagatatacccaagactgggcaatttacaaaagaaagagttttaatggactcacagttccacgtggctggrgaggccttacaatgatggtagaaggtaaaagtcacgtctcacatgatggcagacaagagagtgagagccagggaaaaggggttttcccttataaaaccattagatctcgtgagacttattcactaccatgagaacagcatgggggaaaccgcccccatgattccactatctcccactgggtccctgccacaacatgagggaattatgggagctacaattcgagctgagatttgggtggggacaccaccagatcatgtcagtacccagttctacagctgtggaaactaagactgcacccttaaccacactgtagcatttgatggaagttgaaggacctaaaatgggtttcttgtgtcaaaagatttagctgagggaatcaaatatatatagatctgtgatttgggcaggaaacagaaacccagaagccttttgggaagcacttcccaggagtataagatacatgcacagccgggtgtggtggctcacgcctgtaatcccagcactttgggaggctgaggtgggtggatcatgaggtcaggagatcgagaccatcctggcgaacaccgtgaaaccccgtctctactaaaaaaaaaaaaattatccgggcatggtggcgggcacctgtagtcccagctacttgggaggctgaagcaggagaatggcgtgaaccyggggggcagagctttcagtgaggcgagatcgccactgtactccagcctgggcgacagcgagactccgtctcaaaaaaaaaaaaaaaaaaagatacatgcacttcccatctgtggaaaagttaacagaaaattgtgtgtatgcatggggataagttactcatctactggtggaaattttctttatttattattttatttacttattattattatttgagaaagctggagtgcagtggcttgatcttggctcactgcaacctctgcctcccagattcaagcaattctcctgtctcagccttctgagtagctgggattacaggtgcacgccactacacccggataatttttgtattttttagtagagacagggttttgtcatgttggccaggctggtctcaaactcctgacctcaggtgatccgcctgccttggcctcccaaagtgataggattacaggcatgacccacagcgcctggccagaaaattttttaaaacaagtttcagatacttagattctggcttcgttaaaactatggtttaaggctgggcacagtcggtcacctctataaccccagcactactttgggtggccaaggcgggtggatcacttgaggccaggagtttgagaacagcctgggaaacatggtgaaaccccatctctacaaataaaagaaaaaaaaattaacacacaggtactcttagctacttgagaggctgaggtgggaggatcacctgagcccaggaggttgaggctgcagtgagccgtgatcacgccactgcactccagcctgggcaacagagtaagaccctgtctcaaaaaataaaacaaagcaaaacaacaaaaactatagttgaagctgttggcagctagttccaaagatattggtgggtgtattagtttgctagggcacatatactgggtggyttaaacaacagaaatctatttactcacaattttggaagctagaatctgagatcacagtgttggcaggattagtttcttctgcagcctctctccttggcttgcagatggccgccttctccctgtgtcttcacgtggtcttccctctgtaccatctgtgtctaaatttcctcttctctctctttttttttttttttttttgagacagagtctcactctgtcgcccaggctggagtgcagtggtgcaatctcggctcactgcagcctccacctcctgggttcaagcgattctcctgcctcatcctcccaagtagctgggactacagtcgcccaccaccacgcctggctaatttttgtatttttagtagagacggggttttgccatggtggccagcctggtctcgaactcctgggctcaggtgatccacctgcctcagcctcccaaagtgctgggattacaggcgtgagccactgcgcccggcctaaatttcctcttcttatgaggacatctgccatgttgggttggtgcccactctaaagacctcattttaacttaattgcctctctaaacgccctttctccaagtatagttatattctgaagtactggaggttaggacttcaacacaggaatttggagggaacacaattaaatttgtcacaatgggaaactcgggactggagggactgtgggcacaggtgtttcccaggcaggcaagggaaggttctaattaggttacaagatggtaaggtccatatgagcagaaacctatgttcgaattgttcacttctatgttcctgaattatactggcactgaggagatgctcagtaaatgtaaactgaatgaatgaaaaaatgaggccgggcgcggtggctcacgcctgtaatcccagcactttgggaggctgaggcgggcggatcatctgaggtcaggagtttgagaccagcctggccaacatggtgaaaccccgtctccactaaaaatatgaaatttagccggacgtggtggcaggagcctgtaatcccagctactcgggaggctgaggcaggagaatcgcttgactccgggaggcagaggttgcagggagctgagatctcaccattgcactccagcctgggtgacaagagtgagactcagtctccaaaaaacaaacaaacaaaaaaaaacaaataaaaacaaagaatggacattggatctatatatatcatgtttatttcctgggtgaattgtaagcaaaaagcttgcctataagacagaatgttaagcccagtggtcttgtgtggattctttctggaatgtaactcttcatcttgagactgtggttcctataaagtttgtttcaagtgtttattatatttaattattgcatttttttgagacagggtctcactccattgcccaggctggagtgcagtggtgcaaacatagctcactgcagccttggcctcctgggcttaagtggtcctcccatctcagattcccagtgttgggattacaggcatgagccaccacgcttagcaaagtcagtgctttcaaacataaaaaaaaaaaagcccgttctctcttgcagctgtataggaaggggttctattctgcatcatgaaattgctctaaataattagttttttcactttaggaggccgaggagggcggatcacttgaagtcaggagtttgagaccagcctggccaacatggtgaaactccatccctactaaaaatacaaaaaaattagccgggcgtggtggcaggcacctatcatccctgctactcgggaggctgaggcaggaaaatcgcttgaacctgggaggcgaagtttgcattgaaccgagatcacgccactgcactccagcctgggtgacagagcaagactctgtctacaaaaaaaaaaaaaaaaaaaaaaaaatcaattttaatagagtggcacattgagaacataccctaaacattcattctgttctcccgtgcagccaggagctccagttaattttcctgttaccagcctcatttgttaactctgttcatttgtgtctttccttgaaaggataatttgaacaaaagagtctaagatttttttagaaattgttgcaatatctgaaaaaaaaaaaaaaagaacctcccaaagaaacctgcattctgattggttgtcttccttgattatttgttgctatggtgaccaggaggttaaatagcatctctgtatttcctaaagaataaatactggttggttttctctggcaaatcagaaaaggatcatttctctccttccatgatcatgatgcaataaaagcctagggctcttctagatttatattttatcaaagaaagtgagagtcttgtcttatccaaattaacagaagcacttagtccagtgtccagtcgcttgagtggcggtggccactctcggaagggcaattacaaactgtactaatagtaagtccagcgcgccatctggtggccaattagagaatagcatgaccgtatctacttaaactaaaaggcgactcacctcccttcttgtctgttaaggctgccctagcaaattaatacaataagcttgttcctgttggtcttagtctgattgagaaagaacccttgactgctttgacccatagaatatgacagatgtgacactgtgctgggcatggcggctcacgcctgtaattccaacaccgagaagcagaggtgggcggatcgcttgatcccaagactgcaagaccaacctgggcaacacagaaagaccccaactctactaaaaataacttttttgttttgttgtgagacggagtttcgctcttgtcgcccaggctggagtgcaatggcgtgatctcggctcaccacagactccgcctcctgggttcaagcgattctcctgcctcagcctcccgagtagctggaatgacaggggtccgccaccgcacgtggctaattttgtatttttagtagagacagggtatatccatgttggtcaggctggtcttgaactcccgacttccacccacctccgcctcccaaactgttgggattacaggcgtgagccaccactcccggccaaaaatataacttttaaaaataggctggcgtggtggcccgcacctgtagtcccagctactcgggaggctgaggcaagaggatcccttgagcctaggaggtagaggctgcggtgagctatgatggcgccgctgcactccagcctgggtgacagaacgagaccctgtctaaacaaacaaacaaacaaacaaacaagtgacaccgccaggcctggatctacattttaagggaaccagcagattccgtcgtgatctctttggctcccaggctactgtgtaagaattgcaactccccagccgggcgcggtggctcacgcctgtaatcccagcactttgggaggccaaggcgggcggatcacgaggtcaggagatcgtgaccatcctggctaacayggtgaaaccccgtctctactaaaaatacaaaaattagccgggcgtggtggcaggcgcctgcagtcccagctactcgggagactgaggcaagagaatggtgtgaacccaggaggtggagctttcagtgagcccagatcgcggccactgcactccagcctaggcgacagagcraaactccgtctcaaataaataaataaataaataataaaaaaagaattgcagctcccctaagagcatggagctgtgagaaggcccaggagaattgaagcttccagacatgggagtgaagaagccatcttggaggtgggtcctccagccctcatcacatgatgccacgtggaacagaaatgaacatccagtcaaacccttttcacattcctgacccacaaaatcctgaacaagcttgggaattaagctattactgtgccattttttgttgttgttgtttttgttttttctttttgttttgttttgggttttttttttttttttttttttggttttctgggttttatttgagatagagttctgctcttgttgcccaggctggagtgcaatggcactatctcggctcactgcaacctccgcctcctgggttcaagtgattctcctgcctcagcctcctgaatagctgagattacaggtgcccaccaccacgcccggctaatttttgtatttttagtagagacagtgtttcgccacgttggccaggctggtctcaaactcctgacctcaagtgatccgcccacctcggcctcccaaaatgctgggattacaggcgtgagccaccgcctgcggccattgtgccacttttatagaggaggagattgaggttcagaggcccagttgatggtccaagatcacacactgggaagtactggaaccagggttatgaaatcctgtctgcttggctgcaaagcctctactcttccacactgcattatttaggaagacagacaggctttgggcacgagcgtgggcctcactgaggggagaggggccttctggcctcagtaatatccctgttcccttctctgactgtcacttcccccttagagacagagtttctgcagagtggagtctcttctcacgcctgggagagtttgtgcaggagacatgagagctgaagatctggcaccacctttgccttaaagacaaaaggtgacatttgggaaaagcatgccactcttcgagtggtacttaaggatccatgggctgaatctgcctttttttccccaactgatttggcaaggaccttcaaataaatccagtggagcttcttggggcagcatggcccactctcaagagtttagcctttgagtcatgtgtggtggctcgtgcctataatcccagcactttgggaggccgaggcaggctcacttgaggtcaggagttcaagaccaacctagccaacatggtgaaaccccatctctgctaaaaatacaaaaattagctgggcatggtggcaggcacctgtaatcccagctactcaggaggctgagggaggagaatcgcttgaacccaggaggcagaggtggcagtgaactgagatcgcactactgtactccagcctgggcaacagagcaagactctgtctcaaaaaaaaaaaaaaaaaaaaaaaagagagagagagagagaatttagcctttggactcgcacagatctaggttcaaactccagctttgctactgcagcctcagcgcacttatctgtagaatgggatttcaaaatgatgtctgcttctcaaagttgctttgagaatttgctgatattttgtctttaaaatacttcattgtgtgctgccttacacaaagatcagaatctctgaaaggacaggacaggaactttttactcactcactgcttcactcactgctgtatgcccagtgctttcaaaagcacctggggctgggcgcggtggctcatgcctataatcccmgcagtttgggaggcagargagagcagataacctgagatcaggagttcaagaccagcctggccaacatggcaaaaccccgtctctactaaaaatccaaaaaaaaaaaaaaattagccaggcatggtggcgcatgcctgtaatcccagctactcaggaggctaaggcatgagaattgcttgaacccgggaagcggaggttgcaatgatccgaaatcaagccactgcactccagcctaggctccatctcataaaaaaaaaataattaaaaayagtaaaaataaataaaaagcactcagcgtgggattttcaataaatagttactgaatgagtaaatcaaaagcagtcaatgttacatatgatgatcagggcattttcagttgcaagcaacagaaatctaagtcaaactggctaaaggagaaacaaaaattcactggccatcttattgtaagacaatagtgtagcttaaacaataaaaacaaattgaattctctttcccatagtagctccggggtgaatgaccttgtgaggctgtgcgtgtggccatcattcaggaacccagattctttcggattgttgcttaaagtgtagtcccgagaccagcagcagcctctggcaattcataggaaatgcacattcccaggttcccccaagacctactaagtcggaagctccgggggcaggwcccagaaaactgtgccctaacaaactctccagggaattctgatgcccactttgagagccactgacctcatgctctgtcagcatttgcataattgaatgtgccacctctgagtgacttggtgaaagggaaaaaagagaaagttcagagcaagacatttccttgaaagcaggtaaagtggaaattgcgcaagtcatgtccamctgcaagccactggggaggacccagtcatgtggctgcagccaacctcaagggaggctgggaaatgtagtccccagccaggcagccatgtgcctgaggagaagaggagatgggcttttgctgtccaaaggtttttgtttgtttgtgttaagagacaggacctcactcagttccccaggctggagtgcagtagctgcagcctcaatctcccaggctcaagggagcctcctgtctcagcctctcaagtagctgggactacaggtgcatgccaccatacccagctaatttttgcatttttttagagactaggtctcaacatattgcccaggctggtctcaaactcctgggctccattcacctgggccttccaaagtgcttggatgacaggcatgagccaccactctaagcccctgtccaaagcttaagactgctgcagccatactcctcagggtcccaaagtcttccttgttacctgaaagcagaaataaatagttctgaggtgccagcagttttcatggacacctccccaggtgatatgattaggcttcatgtccccacccaaatctcatcttgaattgtaatcgccataatccccatgagtcaagggagagacagatggagataattgaatcatgggggtggtttcccctatgctattctcatgatagtgagtgagatctaatggttttgtarggggctctttcccctttactgggcacttctccttcctgccgctttgtgaagaaggtgccttgcttcccctttgccttcagccatgattgtaagtttcctgaggcctccctagccatgtggaactgtgagtcaattacacctctttcctttataaattacccagtctcaggcagttcttcacagcagtgtgaaaacggactaataggccaggcgcagtggctcacgcctgtaatcccagcaggggaggctgaggtgggtggatcatgaggtcagaagttcgagatcagcctggtcaatatggtgaaaccctgtctctactaaaaatacaaaaattagctgggcctggtggcacacacctgtaatcccagttacttgggaggctgaggcaggagaatcacttgaacccaggaggcggaggttgcagtgagctgacatcatgccattgcactccagcctgggcaacagagagagactccatctcaaaaaaaaaaaaaaagaaaggaaaagaaaagaaaatggtctaatacaccagggcayggccaaaagggtccttaaaggttttgctccccagcatcagtttaaccacytggaaacaagaggccagaaattgctgcaggcagggaacagaggtcttatgctatggactgaattgtgtccccttatccccaaaattcatatgttgaagccccaacccccaatacgactgtatctggagataagagtctttaggaggtaattaggttaaataaagtcacaaggtaggatcctaatctgataggactatgaccttataagaagagaaagggccaggtgcagtggttcatgcctgtaaccccagcrctttggcaggctgaggctggaggatcacttgagcccaggagttcgagaccagcctgggcaacagagtgagaccccacttctaaaaaaataaaaaatattttttttaaaaagagaagagaaagctgtctccctgaccatgtgaggacatagtgagaaggtggctgtctgcaaaccaagaagasagccctcctcagaacctgaacatgctggcaccctgatctcacatttgcagcctccagaactgtgagaaaacagaattctgttgtttaagccacccagtctgtggtattgtcttacggcactctgagctgacttaagacagtccagaggggagacattgttaggagaagaggcctctaagaaggtgaagagcgtgcctgagacccttcccagtgtagctccggcagtcctcagcctcagtcttccctgggtccttgtggatgacaaagaagcccccatcacaaagaagcaccattgattgggtctgcaaaagacccagtgggactcacaggagctcacatcagggtcactggagtcaagggcctccataccacaggctcaccacatctgggatctcaccactcgcactaaatatgggaataggaaacctcacccagtgtgggtcccaaggagcaggcttctagtctgggaaatcatgtctcttttgatggcactcgcagttcctccttccctggctctagtctacacttattactgtgctctacaaagccctgtgtgtctaactcctgcatagtaatccaagtagcagaaacactttctttttattaaaattcattctcccattcctccctttagtaataagatgattgtggctgcccaattagaaacaacatctgggctggtcatggtggctcatgcctgtaatcccagcactttgggtggccaaggtgggaggattgcttgagcccaggagttcgagaccagccttggcagtgtagcaagaccccatctctaagaaagaaagaaagagagagagagacagagaaagaaaaaaagaaacaaaacacctgccagccttcctgataactaagtaagctcatgcacctaagttcaagcccttatgagctcaagtgatgtgtacagcttctggtcagttcctataaataaagatgctggcccttgactgtcttcctttctccttcctggctggggaacaactacagcaggaacataactaaagagagaagccatttcttaaagatatcaaagccaattcacaagcctgaacaccctcatgaagcaaaagtgtctgcctgccccagaccagccacctacctttggatagagggagagagagagagagaaaaaagttcatcttagttaagccacagtctttcattagctattttcactgtcttaaactctcttttatatttttcttcttttattttctctgtgcctcagtctagatattttctagtggcctgacttccagctcattcatcctgccttctgctgtgtctaatctgttgttaaagcacattgactgaattccttgttattattatttgtataaatttaaggggtgcaagtgcagttttgttacatggatatattgcatagtggtgacatctgggtttttggtgtaatcattacctgaatggtgtacttcgtatccattaagtcatttctcatccctcgccccctaccaccctcccactcttcccagtctattatttcacactctatctgtgtatacacattatttagcttccacttataagtgagaacacggggtatttgactttctgtttctgagttgttccacttaagaaaatggcctctagttccatccatgctgctgcaaaatacatgatttcattcctttttatggctgagtggtattccattgtgtgtgcacacatacacaccmcacacacacacacacacgcatatataattttctttatccagtcatccattgctggacacttaggttgatttcatatctttgctattgtggatagtgctgctgtaaacatacaagtgcaggtatcttttttcttttttttgagatggagtcttgctctgttgcccaggctggagtgcagtagtgcaatctctgctcactgcaacctctgcctcctgtgttcaagtaattcttgtgtgtcagcctcctgagtagctgggattacaggcacatgcaaccatgcccagctaatctttttgtatttttagtagagacaggatttctccatgttggccaggctggtcttgaacccctgacctcaggtgatcaagtgttggggcctcccaaagtgttgggattataggcatgaggccaccatgcccagctatctttgcctctttgatgtaatgatttattttcctttgggtatataccccatagtggaattgcagggtygaatggtagttctatttttagttttttgagaaatctccatactgttttctgttttctatagagattgtactaatttacactcccaccaacagtatataagtgttccacttactgaattcttaatttcagttatggtacttttctactctagaattgccctttctctggtaaaattacccatcctttcatataatccctgcatgtttttttcttttgtcttgagcatattaattctagctatgtaagatccttgtctggtaactccaatattaagattatccatgggtctatgtatactatctgttttttctcttgcttttcagtcatttggtctcgcctctagcatgtctagctattgaatgtcaggcattgtacatgaaaaattgtacatactgccccagagaggaaattatctttatgcagatagagtggtgctcatcactttaattcagtcaaaaactgggctgaatctagactgggttgccattttggaaaggcaccatgcatatctagtttgcacttgctcatggattttcaacctggagcctgggttataacctgggggtccatgatcctggcagctcttgaactcttcttgtctcttcagcattgcaagtctgctgaaactctattctgcttttcagaggctttcttcctggcttcttagactctaccccatgtagcttcagagttctgcaatgtcctcaaacaggaaccagaaaatcattaggctctttttaacttctcctttccccaggtcctagtccttcaagtctaattttgtccttcctgctctttgggtgtctgagaaggattcttctgcccaactcttttgcccagatcttcagtctccttccccatacccagaagcatcaaatgccctggagacagaaactgcaaaatgttggctcagctcagctctctatactgttcccccatatttgagattttgttctcttgactcctagttgccttagcagctcaccaatgctttgaaataatcattgctgctttttacatttttaattggcatttcaaattactcctagcagcactattggtctttcataaacaatttcatcatatccagaatcatgggtcattgtattttgaggttttttggtattcatagcttagcctgtaccctgactaacacataacttggcacctggtagtggcactgcagtaacaaaaccctaaaatatgtgacattggcttaacaatcaggcaacaagtaatttaaaatacagatttttggctggtcatggtggctcacacctgtaatcccagcactttgggaggctgaggtgggcagatcacctgaggtcaggagttcaagaccagcctgggcaacatggtgaaactccatctctacaaaaatacaaaaattagccaggcatgatgacaggtgcctgtaatcccagctactcagttgactgaggtgggagaattgcttgaacccggcaggcagaggttgcagtgagcccagatcgcaccattgcactgcagcctgggcgacagagtgagactccatctcaaaaaaaaaaaaaaaaaaccaccaaacaaacaaaaaaacaaacaaacgaacaaacaaacagattttgcaaaccttgtggccaatgacccctatggggctgtgtaaaatcatttggtagaaaaatcatctgcaataacatggaagagagtccacatacttatgaaatctatggtttagggagctgttaaaaaataggattttttattgtagtaaaatatatataacataaaagttgctattttaaccacttttaagtgtgcaattaagtggtattaattgcattcacaatgttgtgaaaccatcaccactatctatttctagaacttttaatcaccccaaacagaactctgtaatcgttacttagggaataatttgttgttataatttttaaattgagatatcattcatctactacaaaattcacctcttttaaagtatacaatttagtgtattttatatattcacaaagttgtgcaaccatcaccacaatctaatgcttgacctttttcattgccctaaaaagaaaccccatacccgttagtaatcactctccattctcttctacccccaggccttggcaacctctaacctactttctgtctatgtagatttgcctattctggatattttataaagatagaatcatacattatgtggccttttgtgtctggcttctttcactgagcataatgttttatgggttcatccatgttgtatcatgcattcaaatttcattcttttattatggccggataacattccattgtatggatatcctaaaatttatttatctattcatcagttgggagacatttaggttatttctattttgggaatcttataaataatactgccctaaacattcatgtatgagtttttgtgtgaacatatgttcttgggtatatatctaggagtggaattgctgggccatatggtaactctatgtttaacttttgaagagctgccaagttggtttccaaagttgctatgccattttacattccccaccagcaatgcaagagaattataattttttccacatcttttccaagacttgttgttgtctgtcatttttattaaagccgtcatagtgggtataaagtatctcattgtgattttgatttgcattttcctaatgactaatgatgttgccttcttttcatgcacttcttgatcatttgtatatcttcttcgaagtaatgtctattcaaattattttcccattttaaattgggattgtttatattttgttgttgttgagttgcaagagttatataatatatatacatatttcttggatgctagactcttactatatatataatttacaaatattttatcctattcagtttgttgtctttttactttcttgatggtacccttcaaagtgtgaaagttttacaatttgatgatgtcccatttatctatttttttctgtagtagtttatgcctttcatgacatatttaagaaaccattgcctagtttaagatcatcaagacctactctatgttttcttctaagattgtatatttttagctgttacaattaggtctttgatttgttttgagttaatttttgtatatggtgtgaggtagggttccagctttattcttttgcttgttgatatccaattatcccagcaccattagttaaaaagactaytccttcccccattaaatgatcttggcactcttgttgaaaatcaattgaccatgaatgtgagagttcatttctggaatctcaattctattccattgatctatatgtctgtgggtgaatggtttttaaaaggcaggatattgatgtattctggctacttcctgctgcttttaaaaaatcgtaagtcagaaatgctcccaggcaagaattgaccagttcacaaacaaaaatggacagaagtaaaattcagcaaaggaaagasgcattttctttctttagcctaacatctaaatgtattgtgagtctagaggcttggagtcttacagattgacaaggttactaaacaacaagagagagcctccaagcctttttgagaattgacattaagattttgtggccggaaaaggagaatcagaccagaagcaaaaatctgatttcatatattattgttccattcaagattgttgtttccaatggtctcaaatagctgctataaatatggagtgatcacaggaactatcaatggcttacagacaccttatggaagctcaytgcaccatctgtaaagttgtcttgccaaagagtgagatttaaatttgattgagcttctagttctaaatactagtttacaggataaacagggaacagaggaatacattaagaaaccccacatggatgcagtcagcagaattcagaatgtggaaaagctataggagaaaatgacctggtttctccaaaaaataactgcaagaaattaaataatgatccatgctacaatatggatgaacctttaaaacattatgctaagtgaaagaagccagacacagaagcccacatattgtatgatttcatttatatgaaataaccataataggcaaatctgtagaaaaagaagaaactgagtggttgctggggctgccaacyggcatgggctttcttttttgggatgatgaaatgttctagaattagataatggcaatagttggacaactctgtgaatatactaaaagccatcaaattgtaacctttaaatggatggattatatgatacatggattttctctaaataaagctatttaaaaatcacaaagaaaaaaagaaggggaggtgtattagttgaatgaaatatatgggctttgttttgatcctgattgaaaatgttttaaaattatgagacaattggacaaatttgaacactgactaaatacttggcgatattaagaaagtacaggccaggtgcagtggctcatgcctgtaatcccaacactttgggaggccaaggtgggaagattgcttgaacccaagaattcgtgaccagcctaagcaacatagcaagaccccatgtccacaaaaaaaaaaaaaaagaagaagaataaattagccaggcatggcagcatacgcctgtaattccagctacttgggaggctgaagtgggagaatcacttgaatcgaggaggtggaggctgcagcgagccgtgatcatgccacagcacmccagcctggggaatggagcaagaccctgtctcaaaaaaaattaagagaaaatatttttagtattgggggggtattgtaatgatattgtaattatgtttttagtagtagttatctcttggagatacatactgaagtgtttacaggttaaatactatgtctgaaatttgttttaaaataatccaatcataagggaaagcaggagtatatagatgaaatgagactgacatatattgacaatcattgaacataagaaggttcattatacattctccctgcttttggacagtttgaaatttcccataacaaaaagaaaaaataaaaatctaaatgcttaagaattatatctggaagagatctttaggggtgggactcataaatggaattgattggaagcaaatagaccaaaaacttaccaagcatttgaggaaattttcttactaaggaaaccataagcctgatctataaaagactaattgctcaatgtctcagagaggtgagttgacttctgaagagtccctgaagacatacagagaggaaatggtgcagaagcaatatcgaaagacataacatctgcaaatgtttcagaactgatgaaagacaccaatccacaaattcaagaagtctttcaaactcaaaataaaataaacacaaaggaaatcaaacacagacacattatagtaaaactcctaaaagacaaaggcaaagagaaaagtcttaaaagcagtcatataaaaaaaagggtagattaccttcaaaagaggaacattattaaagctgacagctgacttctcaatcagaagacaatgaatcatatttttaaagtgctgagaaaaagtaaatgccaacatagaacatatactcagtgaaaataggattatgacatactgtagtgccagcttaaacatactatataagattctttttaactttatggactcaaactaatactgagctatttaatgaataatctttgaacacctggataatgtataagtatgggttaatatataagattttaaaaagaaaatgagaaagaaaaacagactgtatcatgccatctggatgatgggcaaaaacagtaaaactagaatttgatgttttttctgtctttaaaatgacaaagggatcttaaagtattcagtctgctctcagcaaggcatagtaaaaaagttattctttactttctgtgaaatttgtccgggtagcagaggttcttgccttactaaatattcttgtttgagaagatttaacttttttttcctttttgctgaccttagtcatattgttgaattgtttattttttaaaacgtgcagtaaaagattgtcacttacaaaaagctaaattcccttatagttaccttctactttatttatttatttatttatttatttatttatttatttatttatttttgagacagagtttcactctgtcacccaggctggagtccagtggcatgatcttggctcactgcaacctccgcctctcaggttcaagtgactcttctgcctcagtgtccctagtagctgggactacaggcacgcaccaccacgcctggctaattttttgtatttttagtagagacagggttttgccttgttggccaggctggtctcaaactcctgacctcacgtgatccacccacttcagcttaccaaagtgctgggattacaggcatgagccaccgttcctggcctatatttactatttttttttttttttttgagacaaggtctcactctgtcacccaagctgcagtgcagaggtgcaatcayggctctctgcagccttgaactcccagagccaagtgataatcccacctcagctgggatcacaggcatgcaccaccaatgcccaggtaattaaaaaaaaaaaaaaactgtagagacagagtctccctatgttgcccaggctgaactcaaatgatcctcctgcctcagcctcccaaagagttgggattacgggcatgagccactgtgcctggcctatttttgaatatcttgattgtcattatggttaatagggtagccaagctataattactcctttctcttaggcaattatgcacctattttagtcaagtgatcagtattttggacaattctttttgatgtttcctttcataaaatcagactataaattcagaaaagttaaaaatcatcaagatgtttgtacattcaaaataatctttggcccttcctggatggccaaagcaccaaagatctgttccctcaccttgtaacccaccataggaaatacacacacagggcaggatgctagaactcttaagtatatttgatatgctttttttttttttcaagacagagtctcactctgttgcccaagctggagtactgtggtgtgatcttggctcactgcaatctctgcctcccgggttcaagcgattctcctgcctcagctggagaatgttgcccaggctggtctcgaactcctgggctcaagcaatccacctgcctcggcctctcaaagtgctgggattacaggcgtgaggcaccacgcccagcctatatttgatgtgcttctgtttttaaaatgattctacaatagtgtaaaaacctccctgatttttgaacacacaatgtgaaaaatgctttcaaactaaaaagatgagttcagccttccttagattaattttgtgcattmaatgtcactattataaatatatctcagagactgtccacttttacaggatggtgatgtgtcaatatcttcagtgtccataatctgttcttgcccccaggagaaacattgatctaattctcttggaataattatatagtatgccctaatagagcattctgttttcttcttattagatagtattagtcactgtagtaaattccccatcattatttagtcctacaatcaataagtgacttctgctttcctttcatgctttcctgaaggttagctggaaactacaggccagaaattgggtcttggacaaaggaragtcaaagtgcctcgatgaatagacaatacctgataccctgagctaytgacacttcaagaaataggctcactgggttcaggttttcccatgtgtatgagtctgttttcatgctgctgataaagacatacctgagacatggtgatttataaagaaaaagaggtttagtggacttacagttccacgtggggctggggaggccttccaattatggtggaaggcgaaaggcacatcttacatggcagcaggcaagagagagaacttgtgcaaggaaactcccccttataaaactatcagattggctctctgctcctcccgttcaacagacagccgcatcttcttgtgctttgccagccacgtacgtccctgagacaccacagtgaagttgaagtccggagtcaatggatttgttggaaccgggagcctagtcaccagggctgtttttaactctagtaaagtagatattgttgccatcaatgaccccttcattgacctcaactacatggtctacatgttccagtatgattccacccatggcaaattccatggcaccatcaaggctgagaacgggaagcttgtcatcaatggaaatcccatcaccattttcgaggtgcgagacccctccaaaatcaaatggggcaatgctggtgctgagtccatcatggagtcgaccggcatcttcaccaccaggaagaaggctggggctcgcttgcagggaggagccaaaagggttatcatctctgccccctcttctgacgctcccatgttcgtgatgggcatgaaccacgagaagtatgacaacagcttcaagatcatcagcaatgcctcctgcaccaccaactgcttagtgccccagccaaggtcacccatgacaactttggtatcgtggaaggactcatgaccacagtccacgccattactgccacccagaagactgtggatggcccctccgggaaactgtagcatcatggccgtcggactctccagaatatcatccgtgcctctactggcactgccaaggctgtaggcaaggtcatccttgagctgaatgggaagctcataggcatggccttccatatccccactgccaacgtgttggtcatggacctgacctgccatctgggaaaaccctgccaaatatgatgatgtcaagaaaatgatgaagcaggcattggaggaccccctcaagggcatcctgggccacagtgagcaccaggtcgtctcctctgacttcgacagcgacacccactcttccaccttcaatgctggggctggcattgccctcaacaaccactttgtcaagctcatttcctggtatgacgatgaatttggctacagcagcagtatggtggacctcatggcccacatggcctccaaggagtaagacccccagaccaccagctccagagagagcatgagaggaacagagaggtcctcactgctggggagtccctgccacactcagtcccccaccacactgcgaatctcccctcctcacagtttccatgccgatcccccgaagagggaggggcctagggagccccaccttgtcatgtaccatcaataaagtcctctatgctcagccaaaaaaaaagaacaaaaaaaccatcagatctcgtgagacttattcactatcacgagaacagcacaagaaagacctgcccccatgattcaattacctctcaccatgtccctcccacaacacgtgggaattgtgggagccacaatccaagatgagatttcggtggggacacagccaaaccatatcaccgtgtaaaccagcattgtcctcccaagtaaacacctgtgatattctgtaccagaagcagaaccagaatttccagagttctttctattccataagtagattatttcatgacgactaaccctgtatctgataaaaataaataaataaataggccgggcgcggtggctcacgtctgtaatcccagcactttggaaggccgagtcgagcggatcacgaggtcagaagatcaagaccatcctggctaacacggtgaaaccctgtctgtactagaaatacaaaaaattagccgggtgtggtggtgggcccctgtagtcccagctactagggaggctgaggcaggagaatggcatgaacccgggaggcggagcttgcagtgagccgagattgtgccactgcactccagcctgggtgacagagcgagactccgtcccaaaataaataaataaataaataaataaataaataaataaataaataaatattttttaaaaaaacagactcctatttacatagaacaaaatgaaactgatgaaggaaatctgcttgtggttatttttaatattattgagaattgctttacaaatgttctttctttttatgcgcataggaagaagctcttttcctttcttcgtgacccactgccaactctcaatttaacatttatacttgaggaaattggaatgaaagcctctcagtagtatttttccatctgactcttccaaattctggaaaatatatcctgtgtcaaatctcaatataaattataaactgtccgggtgcagtggctcacacctgtaatcctaacactttggaaggcaggggtaggatgatgtcttgagcccaggagtttaagaccagcctgggtaatacagcgagaccccatctctacaaaaaataatttttaaaaaatattagccaggcgaggtggcacacacctgtagtcccagctcaggaggctgaggtgggaagagtgcctgagcccaggaaatagaagttacagtgagccatgattgcaccactgaactccagcctgggtaacagaccaagactgtctcaaaaaaaaaaaaaaattataagctaacaaatcatcagagactgaaatattataataattctaatcagaatgcagatgaatgcatttatgatgggtaaggcttagaaaaattataactgctccttagcaaagaacattggttgtgcttgaattttatggttataatgtatcaataaataactgaaccatatttatatatattatatctggaaagatccataatgattctgataaaaatatgaaaaacatcaactgactaagtagtcggtgcaactacttagaataatgggtagatattattacaaataacttcatcctttctgacaatgcagaataacttcatccatcctgacaatgtagcattttcatgagtttaatatgcattggctcccattgttgcaaggatatagacaaatcaaatgtactaccaaggctatactgacaatatcgtatgtgagaataaagccagttaatctagtcagaaaagcccaccattatggaacaaaggctgatgtgtagaacttcatttgtagaaccagatcctacaagccctcccaggaaattaaaccagtatatatgctgtggtttacaggatctcagtccagacttaaaggatcttgaaggaggaagaattcacccataaaagtaggcagcagggtgtggtggctcacgcctgtaatcccagcactttcgaaggcgatcacctgaagtcaggagtttgagactagcctggccgcatggtgaaaccccgtctctaccaaaaaatacaaaaattacctgggggtggtgacacatgcctgtgatcccagctccttgagagcccaaggtgtgagactcgcttgaacccaggaggcggatgttgcagtgaaccaagattgcgccactacactccacctccaggtgacagagggagactccgtctcaaaaaaaaaagtaggcagtaaaagaaagttctattcgttccagactaatagagtccagtccaaatatacaactctagattccttacataatatccagacagaagctaattctctggttttagcagtgctcaccaccacataattctagatttactaaccatacaacaaggaggcctctgtgtgcaattaacacctcttgttttatctatgtaagtttaccaagccaaataggacagagcctacgctatataaaggtacaattcagagaccacatgaaatagccaccactgagtctgtgtactaatataaatgatatacaaacattattgatcattgggattgggaatatatgccacaaactaagctccaatttgttttctatttcccgtaacatttgtgagttatccgatattttaattaagaatagtacaaaccagaatcagaccaaccccttattttatcaatagttacctttagagataacatgatttcaggagctctgtgcaggaaacttattcaacacttggaaaataagacttaaaaatgattttcgtctggcgcagtggctcatatctgtaatcccagcactttgggagccgaagcaggtggatcacctgaggtcaggagtttgagaccagcctggccaacatttcaaaaccccgtctctactaaaaatacaaaaattagctgagcatggtggcgggcgcctgtaatcccagctactcgggaggcctgagacaggagaatggtgtgaacccgggaggcggagcttgcagtgagccgagattgtgccactgcagcctgggcgacagagcgagactccgtctcaaaaaaaaaaaaacacaaatggaaggaaggctggggctggggttgtggggcccaccccgtgtacactccacgtggcccagctgagagctcctcaggttgactcagagcacaggcagacaacaggtatcctaatttgcttccaacaccaaggccctggcgtatttcagaaaacctcggaaacaaaccctaaatgctcagcatttggaggcactaaaaacatgcacaaaacacacaagcattgagtgatttatttgccatgatctcttgctgctgttcagatccaagagacctcagggagaagggctgagcaggcaggggtgtccatccggccaccgcctctccctttcctcttgagggctctggggggtgttggactcacatgaataatcccagatctgaggacgctgacactgtcactgatgggacagaaagcagtcacgagaccaagtctgggctctcctggggcttccggtctactaggataagtggaaactaaataaacaactagaaatgcaatcatttcatggagcaaaaacacatgctaccaggaaagtccaactgggtgatgtggtggaaagtgactgcaggaggactctgctttaggtagcagggctggggaagttggtgacacctggcaggaaggaatacaaaggaatacaaaggaggtagccatggtgggcaaggggagtgacaagaggagaggcccaggcatggagaagagaagagaaagtgaaagtgcagagatttttgtttgtttgttttttgttttttgagacggagtcttgctctgtctcccaggctggagtacagtggtgcaatctcagctcactgcaacctctgcctcccaggttcaagcaattctccagccttagcctcccaagtagctgggattacgggtgcacgccaccatgactaattttcgtattttttgtagagacggggtttcaccatgttggccaggctggtctccaactcctgacctcaggtgatccacctgtctcggcctcccaaagtgctgggattacaggtgtgagccaccacacccggccagtacagagctctttagtgaagaaattggaggacttgaggatctgagagaggccagaggacagcccccagtgagcaagactcagtgagttctcaacttgaggcaggaagagatcaagatatagaggctcctattttatttcatgcataagacagagccttggagagtcttcaacaggggtgacaagacctggattgtgctttttttttttttttttttgtagagtctcactctgtcacccaggctggagtttagtggtgcaatctcggctcactgcaacctctgcttcccgggttcaagcaattctcctgcctaagcctcccaagtagctggaattacaggtgcgcaccaccacacccagctaatttttttgtattttttgtagagacagggtctcactgtgttgcccaggctggtctcaaactcgtgaactgaagcgatccacctgcctctgcctcccaaagtgctgggattacaggcatgagccatcatgcccagctggattgtgccttataaaagtccctttggctgaatgtagagagaaaatttgaggaaagcaggggtggaaatgagtggccagattagaaggctgtttgctcaagcaggagagagagcatcgtggcttgggtgagggtagggggagagggaggtagattcagatttgggattgattttggaggcatgactaacctgtgttctcacgaaaatggatttgtccccagagcaactacaagtctatgtgacatcaaggttcataagacaggagaatcaccaagggaaaaatagggccccaaccaataagacaaaaggaatagatgtaaggagaattggaacagggccctaagatctagaagtgctggtgttggaggtcaacagagtgtcattcactttgtcagccagcatttccacccctctggtttggtgtcagtgtttatctgctggctttctgcttcattcttagtcatcagcaccctcctttgtaccaccaggctagaagcctgcaaactatattgcccagcttcccttgtgagatggcttcccaataggttctgcttgcaggaagcaccacttctcaattctttctgcttctaggagggcctctggccacagccaaagaggtgaacaaggtcccagttcccactggtcatgaatttgtaatgtgtcaatttcattaagctgaaggaggtttcccacaagcctttccctatgcagctgaaagttagcatgggccccaggagacaacgtgcatgaatgtggaaggcagaagggaagcagaagccacatgcttttgtgttgggcaggtgggtgcaggcccaggcactgtggctgtcatgcacgttgtttgcaccttgaggctctccctggggatgtgaggcagcagccaggcccctacctctcccagctcccacaggatcctcctgcaggtacacatttaactccaaatcaaagagcagtgacttctcctggaagacatccgctcatgaaaattggagtcctggagactgtgagggtcccgtctgtctacatggcttcccactgatcctctcagttcgtctgccctggcttccccactttgtatcccatcttcccttcccaatacctgccctgctgacttcaggctgtaccagcagatgcagagagatcacccttacatagatggctcaaccagcttatgcaatgcatatggtcaaatccctatcacccatcccttatgaattgtgatattcagcttcctatatccatttacctagatgatatggtttg

SEQ ID NO: 97650 - DNA, 21298 bp, Homo sapiens
tatcgttcagcaggcccagccccgggttctcgggaccctcgtagaacttgttggtcctgtcagtgcggctcacatccctttctgcggggaccgggcacagggtgcaaaggtgagaaaggtaggggggcccatccctgctggccaccagtgccagcccccactgctcctcctgctggcagcccccagcctcggggtttgctctgggggagaagcagagctggttctagaaactatcactgatgctcctgctgtgaggcgccaggcctcccactcaccagctggctatatcctcccacagtaggggaaactgaggcccagggaggcaaaatcacttgccaagatcaccaggcattgacagaactgagactgggcctgaagggagctgggctccccttctttcccatcctgtccctggccttgctcccccagggccattccccaacagcccatgcagctttcccccaagatgccctctcactggtcttggggaggcagggggctccctctatctcccactcgcacttatgcctgaggccctcctgtggttccctgctcccatccaccctaagtgccacccctgacactgaccgatgaggctgcggtatccatgcagaagtgagtttctccgctcctgctcagggctcacagatttccactgcagcttcatgcggaaatactcatccctgagtgacagagggaaacaagatgtgaggccgccactgtctgcaacacccagagacctccaagcctggcgccacctcccaggtcagccctgcagagcccctccctgaccacacagacccaagcaggtcacctcgtcattcttgccactatcccttacacttcaccttcctggcatctctcactacatagccttgtggccttttgatgaaaatttgtcaccccccactggacagggcaccagggacagggaatcgtccagcactgctgcatcctcagtgcctggcaggtatataacctacaccaggaatgaggagagacgggccctcctaggttataaaacatgctgcaaaactgtgatcattaaaacagtatggcacaggaatgaaaactgcaatggagacagaccatacaggggtgaggatgggtctggcttgatcattgccgtattccacaggcgcaggatggtgcccagatacagcaggttcacaaccagcgtccacagaacttgcccattggtgccctaggaggtaccaggtgtcatgcctggcagggcagggcctcctgaggactcacgttttcttgcgtatgtgggccttgtgctcctcagctgtgccttcccagctgaggtaccctaggaggaacttccaggcctcgcgccgcaggctggggctcagaccctgggggtgcaggagggcaggcagctcagtggggccttgttctggccctgccccattcttccacctgtcctggcactcacccccgagaagatccggttcttcagctcagggacctgctgcaggcgaccttcagggcccacgtggcgtgcccactcctcctctgtaactggagggccccgctccacggttggccgaggccccagctccacctgcaggcaaagagcaaatgagcctggggctcggcggggtggtggggggacccaacccagcctcagtccacaagctcagagagcttattagcttgacggatgactaacattcaggggcaggcagcagcctcttccggggctcagcagccaagtcatcccccagttaggaggggtcccccaataagggtgagcaggtgctcacagtgtctggcagagccatgagcgctttcctcatgcaccccctgagggtgtcccattaccatccccgttttaccaaagaggaaactgaggcccagggaaatgaaatcatgcgcccagggagacacggccagaaataacagggagggtccactcactactcacacaggaaatgacctcgaatccaggctcgggctcatcgtcgggtggcgggggaaggtcggaggcggctccctcaggctgtggctgcagggcaccccggaagaagttggtcactcgggagaagctgctgaaggtggtggagtagggatcctggaggaagcgctggggacgaggccaaagggaggtcacggcccgccccttctcgtccctccctgcccacacccgccaggcctcctgctggggacactcactgacaccacattggagctgtcctggtcaaagagctgcaggtggtggaaggagttggagagagcagaggagtcgtgggggaagacaaggtagaggcgggagtcctgcggggagctgggaggcgggaggtgacgcacaggtgatgcacaggtaggggcccagtgtcccaggctgtctgtgctcggccgacatcggttccagctgcagcgtcccaaccacccctgggcaacccctcatttcagggaatgctgttaaaggaggcccacagctggatcccaggggtgggcacatgactcggggctggccaatgagggcctttcaccttccggtccagtgtgactgactcagggacgagccaatgagaagcagctctgggatctcgttggaacgtggggaaagaggtgccttctatccagccgggttgttaagccacggatactggggccccagagaataacgaactcagagggaaaaaggataactgtttctaacattttgggacctgggtcctgcctgaaatcaatactcccttttgactttttagttatatgtgctggtcaactctttgcctgcctttaaatcagtgtgagttgtgtttctttcacagccccgaggggtcacgctgcagccatggtgggactgggcccggtttaaggcccagcactgggagagagctcacctggccaacagcaggtagcggctgaggacgcggagcagggcgcgggtgcccccgcggtggaagtgcagtgcgggcagggaacctccagcctgggtcaccagaaccaggtaggcccagctgaggcctggcttggagcggcggatggactttagctcccccagactcactgagaaggcccaggagccctgggggcagctgggctctgcacctagggagacggcactgtgttgggggaagcgcgtgggaagccagagtcagccttatcaaccacaacccaggatgttccttcggcacaggcatctcctgagggccccgccacaagccacccctctgcccctggcctcacattccttggaagcacaaatgagtaagatgggaagggggcccagtggacatgtacctttccagaaccttcctaggcacccctcgacctgcagggtaagggccctattcctcaacctggcactcgaggcccctcgggtctgtccttcgcccctgcctatcttacctccaacctttcttcactcaaaatcccacacttgagctacaatgaaaggccagcggctccctaaacacacgggggccgcctgcctctggcttgcacgggctgctctctctgccagaagagaaaactcccaagagtccctcagtgccaagctccagcatcacctcttcctggaaggaatctccattccccagaggggtcacgtgccttctctggatgtcccctgcaccctgtgtgaccccaggatggtgcaaatcaccctaactggctgcatctgtcaccccaccagcctcgaacctcaggggcaggcctggtgtgggagcacccacagccaatccgggagcccagtaggatgagcaaggctgcagtctcagagacactggccatgttgacctgggctgggacagtcctgtcttcccattcacttccatgctcctgggactggaaggtggtgactggtggccttcttgattgtgggcagcaaagcccttgggaccgtgaccactgagggcaagatgtgtcctacctggcccacacgtgcttctcaagggccgccacctcagcctacctctcgtgggctctgagtggcagggctgtggccgcacagtgctgatgacagcccagtcaggttcatagccggggtcaaaggttggttcctcctcagaagcacatgagtcacccccactggagtccttaggagaggaaaggagcagacagtaaggggccatggattcagatcttagcctcgaggctaccctggaagatagccccattgaataaagagggaaactgaggcacaaagaaggtacagcaggccgggtgcggtggctcacgcctgtaatcccagcactttgggaggctgaggcgggcggatcacctgaggtcgggagttcgagaccagcctgaccaatatggagaaacctcgtttctactaaaaaaatacaaaaaaattagccaggcatggtggcgcatgcctgtaatcccagctactcgggagggtgagaaaggaaaatcgcttgaacctgggaggcggaggttgcagtgagctgagatggcgccattgcactccagcctgggcaacaagagcaaattctgtctcattaaaaaaaaaaaaaaaaaagaaaaaagaaagtacagcacttgctcagggtcacccaatgcagccagagagcgagccaggacttgaccccatgtctcccactgcatggggaggtccatgctacacagcaggtggctctgcagtcaggctgcggagtgctcaatggacactgttgtactcaccaggtaaatacaaaccaaaaccacaataagataccactttgcactcttttgagacagtgagactgtcaaaaaaaaaaaaaaaaaacaataacaacaacaaaaaaaacacactacatttcccaggtttctttgcagctggaatccaggacacaggacaaattctaccaaccagatgcaggccaacctggaaagcggaagtgatgtaacgcaacttcctggtgccttggctgtgtttggctgtggagcaaggtggagagtcatcttcatcttcatcttcatcctcctgccctggggcagcgcaggtggtcagctcagccttccagtgtctcgtcactagctctgtgggtgccgactgacttccggcccctgggtggaactcatcagctccaatggaggtctcattccccactaaagaacccccctacagaggcatccaacttctccgtgtgccttgaaggttgttctgctgtccctgaaataccttcttgtcctttcatatcctgggagtcccagctcaaatgtctgctctcccaggaagcgttggggatctggaatcagactgtctgggtgcaaaaagttccaacacttcctagcgttttcgacctcatctatcagtttctcaaaaagtgagtaagggtcagggcttaggtgggtctggatctgacttatctctgggtctcagaattgcccaggacggggtccagccatgggaagtcccaggagacataacgaagggaaagccgggagcagtgacgaagtgggtgagtaggctgtcaggccctgtcctctggcaccagaggaaatgccatttcccttcaagcaactcgaatccacatcttgcaccctggcagggatctcccaagaagcaaagggagagaggggtcagccgtccccacgaccgtgcgtcttatgctccctgctctttttccttgaatgggcatcctctgcccatttcacagagaggagcaaaaggagaggcagagtacccaagcctaaacagggtcacacatgccccacgagtaggtctgggattgtacgcaggtccctcaaatgacttacaacagcacggacctagaaaaaaagcgagtggagaagggcaaagcgggtggagcctaccttcttggagaagaggatttgggtggaatctccagcctcctctacaggagcccagtgcaggaggacgtcattgtcctagggtaaggagggaggcggggttagaggcgctccccaaaccacattcccaaaactttccgttgcaaatttccaaactttcccagtttctaccctcagcctttcaaagtcccgcccctcattccagttcccacacccagccttcttcaggtcccactgctgaccgccagaccaaactcctacagctgccgcctgcatcccagaccgcctgcatcccgctcggagcgggtccgagccctgctccctcccagcgcaccttttccacgacacggatgacaccrgcgatgagagagtctcggtcctgatacttcttagcgctggtgtgcaggtacactccgcccttctcaaacaccacctgagttggggggaaccagcgagggctggggcccaagcsaggggaccagcctggggagccaatagggacgggcccagggaggagccaccctcagggggcggggccgggagggccattgccccgggaccaaggcggggagaatggtccagcccgcgttcggawgctgacgtgcgttccacagggggcagggctcaaggagtcgcctgagccgggggggcggggccatgggaggttcttccctggggcggtggacgggagggtgacggcgcgtttataagagatcggtgtttgccaaggccgtgccggattctcgagagccaaggcctgagagaagagctgatcactagacggggcgtttcgcatacactgaagcgagggaatgcgtcctcagtgcttaccctgtagccggctccttccatagtcgccgccgaaggccccactgccccgcctcctccttttcctagtcagcgtgttgtcacttccggagaaaacagttcccctccgggccggacagtggtagcggcccgacccgttctagagamggagcgggtgaaaccatttttcagaagggggttattccactggaacctcgagggtggatcggagtcacgtggcgcagacgctgaaggtggatccggctacggagagtgcgcaggcgcagtgttcgccctctcgccacgaagtaaacaagtgggagggtctgagagctgcaccacctggggcaagcacgccttgaaacgcccacttccttctccatattgtatactggaattgaagccaaggaggtaccattttgctcgagggcatggcctaagccggtcagctaaggccatgttaatacggggctgtcccatctctctgcggggcgcgacagctggaagagccgaacggataagagaagaggaggtgagaggagctgtacaccacaagaggcactgagggactcaggataacgggatgaagccgtcagtgcccccagaaacgaagcggccccggacgaatttctgagtcaccgtcgcgagaaagcgggctgagccgccattttgaagcctggcaaaccgaagcaagaaatgctgccgtgttggatctttgccagccttcgtgccgaatgggagcaggttggagggagggagagccaatatacactatgggctgattaagcccggttggctgccatgttgttaacgagcaccgatttcctctacttttgtcgaagaagtttattgtgggtcagggacgtcaggtcgcttgccttcgtttactgtggtcatgattgagcatatgaggacggccattattgttgggggcaaatggaaatgctctaggcggggccatttttcttaggggcaagctgtcgtcacccttgtcaactggttcggatgaagcccctgtggccgccatcttgatctcgggcggccccgataagggaggcggagtgtgcggagaggaggcggggcaactgcgcggacgtgacgcaaggcgccgccatgtcttttgagggcggtgacggcgccgggccggccatgctggctacgggcacgtgagtggaggcggcgttgttaaccgcggtgtggggaggatttggccgtcctgaggcagcggggcgctgggagggcgagcggctcacgggaggggtatggcctgcacagatcagagggcagaggtctgccagcgatcctttgctgagcgctggaagggggtcgcccgtgggaatcgtcctgtcagacctgaggcaaatcgtagacagtctcaccttgcggttccagagcgcctgggatctctacctgggccgtggaccacgtccacggggtcgggggatggtttggggggcctcggggcgcccctcacccgtccaaaggcgggacttccggtcctggcctccgtctgggcgggatttcctgttttcttcctagaccagtgggtcctccctggaccccgggcgaggttgggaggtctcggggcagctgagcgtggccccaggcgctcaccccatggctaccgcgttcatgctcaggttcctcacatcttggggtgtggggtactaaaatttcgacaggaggggtggttccacccctctcctccttagctcttttccctcctccctgcatccaaagaggacagccacatcgtgctccccctcctgtggggaacacgtctcactttcctctaatctctccctgatcttacacgaaactcgtctatcgggrcgggttcttcctccatctctcagctccttggaggaaacaggacctcctctagaagctgaagggtaaggaggacccccaggtcttggctactctcctgttgggtagcattacagggtgcccctggaccttggcaaagaggyctgtggaagtcgccctgtcctttttgctcatgtctcctgagttgggggagccctcacaactcactcaccctatttcactctttaatcccgtggctactccaagattgagtacacggagagttcatcctgacgttctcttccgggacctcctctccccctcttctccgcatgtcattaggggctggaggcccgtggaagtgagagccccaggcctagcacggcgaggcagttgactttggaccagccatttcttgcttagagcctcagtttcctccctcatcagctgggaaggacatgggtgtgtttgagacaccgggtaccccccagttcagtggggttttggggctgggcagtcagcagtttcagccccacttgtgccctgtgtagctgtgtgcttttttgccagtgtcctaagctctctgagcctcacagtttcagccccacttgtgccctgtgtagctgtgtgcttttttgccagtgtcctaagctctctgagcctcacttttccatctggattagaatatctgccctcctaaaggcaggcaggatggcggtcaggatttagaacaggccccggatctagactttctgagtccaggtcccagccctgcctcttccagttgtggcccttcaagatgctgactgcccctgggcctgagtttgcaactgtaaaatggggtgaactgtaactaaagctcctgtctcatagtgtaggtgaaagggtgggatgagaaggttgatcccatcttgggtccttgcgtggcttctgggaggtggtggataaacctcttccttcccttggggctttgaactccctgagtgagtcagataggtgagatgccaggtgtggaatcccagcactgaataggtgctcagcaaacaccaacatcaatgatcgtgagtcataaarggcctgcaaatttcattcagactccagactccctgctcccttcaccctggtgggctggaccacagctgtgcctgaatccgtgcagtggcggtgtgcttactgcctcccggaagagcgtcttccgcagcccagcagctctggctcaaccacgctggttaatggggaagaaaatgaggcacagagagggccagtgagccatctaaggtcacacagcaggtttgagacagagtcagggcaaggacccagcccccctgccctcgctcttctcacccagtaaggagacgcaccctgcattgtctgcttagggycgacctgtcctgcaaacacaaatccctgaccttgggggaattcacagtctgatgcaggaggcagccaggttacagctrtcacaagctcaggtgacatgaatgctcatggaggaagcccagggcatcggatgggctcctgaagtcatctgatgcaccctgggggatcagggacaacagaggacctgccagaacagtcttgtaggaaaagccgtgtggatttcccagcacagagagcagcgccagcaccatttcagccccgactctctgaggcctcagtcatagaaccagccagttccctctggaaggaagtgtgctgggaaggtggccactcagacagtgtgggaccccctatggagcagactggctggatctatgggcgagggaaagtttcttccaccctaggatgagtgaaaggttggtggggaatggagcacaagtcatcaaggtcagggaccacgttttctgaaggcctcgggcctcagaggctctggaaggccgtggaggcaggatggcccaggagctggggatggccagaacacctagagcctccagggcctgccctgaggactatggcgaggagtagcatcagctccgggtgctgaaggaaccccctgggccttgtgcaggacactcttgacgggatggctgggcgacggagcagggtggcatcatccatcaaattcaacacaagccccacgtggaattctaaattttctagacaccatgttaaaagagtaaaaaaagcagatgaaattccttttttttttttttttgcccaggctggcttcgaactcttgggctcggtgatccgcctgcctcggcctcccaaagtgctggggttgcaggcctgagccaccacgcccggctcgttcggctttattgtactcagtcttcagaacccagtgcaggttttattgttagaggcctctctgctaggactctctgctaggactccctgcctttccagtactccctgttcacatgtggctggcggctcccacagaggccagggcagggccaaaggggaaggagtacagtgacttggggcaggaggaatgggttggggcagaggacgtcgccagggtctgggcctgcgaggactggatggtgagaatcctggggagtagcaggtttggggaggacacacagcaccgctgggacaaggtgggtggagggtggtgagtgccatccaggggacgggcgggcactctgagtgggtggcgatgatgtaggccgccaagcctcagccccctctgtcctgctctggcccgcagggcgcggatggcgtcggggcgccccgaggagctgtgggaggccgtggtgggggccgctgagcgcttccgggcccggactggcacggagctggtgctgctgaccgcggccccgccgccaccaccccgcccgggcccctgtgcctatgctgcccatggtcgaggagccctggcggaggcagcgcgccgttgcctccacgacatcgcactggcccacagggctgccactgctgctcggcctcctgcgcccccaccagcaccacagccacccagtcccacacccagcccaccccggcctaccctggccagagaggacaacgaggaggacgaggatgagcccacagagacagagacctccggggagcagctgggcattagtgataatggaggtgagagggtgggggcaggggcgggtgcggcccagcgcttgaggtgcccgcaggaggctttgtcggggtgggggcctgcttagcccagagtacttctacagaagtgcagtctcaggaccccagagccagacaggcttgcctggggcttgctgtgtgatctaaagccagtcccttccctgctctgagccttactggtcctggggccagctctgtgctgggagtggtgggcacaaggacacagagcaggctcgggcttttttctcaaggggctcccggtctagccaaggaactggagtcccggtgggggttgggaggctctggggcaggtcatgggtagaaccagagtcgtttccacaacgcctgggaggccaagcaggagttaaagagttgtctgggatgcagccaacatctgaggaagccagggagggagcagccagctgttttggggggaatttgggggtcgggcacttcccggaggctggactgtaacgctagggctttgcggagttagtaggagtttgatcagtcactaggaggtccttgtttgttgttattaccaatggcaggcctcctcaccattgctggagaaaacccgtgtagggtgaagggcaggcatcctgagttcaaatcctggtggtgtcccttagtagccatgggacctcgggcaagtgacttaacttctctgggcctccaggtctccatttgtgaaacagaggtcatagtcatyscatgtttctctaaggctgtgttttgagtcacattgtcccgaacagatcgtagaggtttcatgttagcagcccgttgtgtgcagctgagagggtggcagatccatagaaactgggttggtttttgccgatgaccaggcaggctgctagaggaagttgtttttgaggtgaaggaaatgggtctcagaagcttcagggaggtggagrtggtggctgtggcagtggccgtggctgaggaggaggacacatggagcatggctaggtgctgcctggcctgggcctctaactcaggtcatccacagggctctttgtgatggatgaggacgccaccctccaggaccttccccccttctgtgagtcagaccccgagagtacagatggtgagtgtcccaggctgttcccctcccgacctgrgggcaggcacacggccgacacaaaggcagggacagaagctgaagtccaccctctctttcagatggcagcctgagcgaggagacccccgycggcccccccacctgctcagtgcccccagcctcagccctacccacacagcagtacgccaagtccctgcctgtgtctgtgcccgtctggggcttcaaggagaagaggacagaggcgcggtcatcagatgaggagaatgggccggtgaggggcaaatgtggggaggtagggagggcagctggaagggctctgagccgcctcctccaggaagccctccagcatggatgctgctttccacccataagctaactgaatcctcccctcaacctcaagaggcgagttcttggacacgagccttgcagttttaacaattgcagccttaccatgtgtcctagtgccttatagagaaggcctctcctttccaggagcgtctctatttatagaacacctgctctgggcaaggcacaggtgttttggcatgccctccagtggagaaactgaggcttggagggttcagatcacctcccatccccaccctgcacattcctagccctttgcagaatttgtcccaccccctggtcccctgttcaccccttgtagcaacccctgtttgaagctcctgggctgggctctgctggcctaggtgggtcctcctcacccttcactgagcctccctgaagcagaggggaaactgaggcactgaggggacatgtgacttccctgagaggcagagctgggactggaacccaggtgtgtttcaggaaggagctgtgggctttgagggaggaggcctgggtccccacagtccccccctcaagcctcagtgtccttatatgcaaaccagcagtcacagtggtgaccttttctgtgcatcctccctcaatgaagcagtgagcactgaagaccaggaacagggcctggtgcgggcggggtccacctgctgctgctctctgtgcttgcgactcatggcaacacagttaattgaatgctctggcctcttgcgtgctgtgcccgggggctggtctcccactgggctcaggtccagttcctgatctgggtctccgggtcccatcctgcgaggggacaggcccagctccgggtgacgggggctgtagtggaggcagtactaggtgccagaactgcaggctccttggcgggggctgacacagcgagggatcttttctgtagcgcagtggccacatgataaggcagtaacagctgattatctcagccctcacagagaccctgttatccgccccatttttcagaaggggagactgaggcctagggaagcaaaacctcttgctcatagtttgtcagcggcagaggtctgattggaacatgactraaaccccagcccagatcctcagacatgagacggtgcactcagccttaatggctagcaggcaacagcacttccactgtgtaggaagcaatgtcctaggccaagaaggggagagggagaggggcaggtaggcttcgtggaggaggtgtctgaaccgggtagaagggttcctacgtggagcaagacggggaggggcactgctggcagtgggcatcgcagggcacaggtggcagggcagggacgtgctagaagtgggcttggagcccgggtgcacccctggaccgcgtgtgggtgcagggggattgccctgccggcgctgacctcgccccgtcgccgtccccgcagccctcttcgcccgacctggaccgcatcgcggcgagcatgcgcgcgctggtgctgcgagaggccgaggacacccaggtcttcggggacctgccacggccgcggcttaacaccagcgacttccagaagctgaagcggaaatattgaagtccagggagggagcgccccgggccgcgtccgccccgtcccacactacgcccccgccccactcccggggcctgctmatctgaggccgatccgggaccggcctccttgcgtctcccattcccaagattgtcccgcctctgccaatccccgccgtccttccagcccacgacctgccgcgccgaggagcggcatctgtcccgtttcccgattgggtctgtcgtctctctccgcctagcgacagattccttctattaagggattggctcgctgagttctaagctctaaatgggtcaactcctttgttttycgcctagcgacaagggatttgctcgcacggcattggctccatcccctagtcgctggacagctctttttttgattggctcaaatcctgtaaagggcttgaccagtytctacatagtcaccgtccgcttttcctgagttctccctcccaattggctccagcttcctgggggcgtggccaagccctcctcttcccagaattggcccggggccttcaatttacgttctttacactacggggactggggtcgtctttgcccacgtcccgacaacttgttccctgaccccctcagggatggccccaaactgtccctgcctctggcaccccctttcattggttccatccatccccacaacagcctgccaatcgaagcccgtccctgcatccaggatggtaccagctcccgcccctcgccccccacctccacaggtgccttaaagggccctcgtccacccaaggtggggggcaggggccctcactctccggccctggtgtgggggagagagtgaggggttgggggatcggcagttgggaggggcgctctgagattaaagagttttacctctgagataaatgtgaagtgtgttgtgagtgttcattcaacattttctgaaaccgaatggcagcgtctgattatcagtgaatagctgggggttggaattactgtgcccattttatttacttttttgagacagggtcccactctcgcccaggttcaagcgattctcctgcctcaacctcccgagtagctgggattacgcgccactgccgcccgggtaatttttgtattttcagtagaaacagggtttcatcatgttggtcaggatggtcttgaactcctgacctcaaatgatccacccgccttggcctcccaaagtgctgggattacaggcgtgagccacggcgcctggctttgtgcccattttatagatatgaagacacaggttcatggggtggaggagagcatcccagtcttatgtgaccatggaacccaatcttgaggaggtgagtgttggagacagagcccacatattcaccagcaaagccaggaactccagccgggagtcttctattataaaaggactggagcaactgggcttggtgcctcacgcctataagcccaacacgctgggaggccaaggcgggaggatcacatgacaccaggaggtcgagatcagcctgggcagcacagtgagaccccttctccaaagggaaaaaaaatggctggaggttagaaagcaggtggaacctcgtccgaaattaggactaggtaaacgtagtcccaccagaccactaccgaaagaatgctaacactaaataagacttaaacggatctgagcactttgggaggccgaggtgggcggatcacgagatcaggagatcgagaccgtcctggctaacacggtgaaaccccgtctctactcaaaatacaaaaaattagctgggcgtggtggcgggcgcctgtagtctcagctactcgggaggctgagacaggagaatggcgtcaacccgggaggcggagcttgcaggtgagccgagatcgcgccactgcactccagcctgggcgacagagtgagactccgtctcaaaaaaaaaaaaaaaaaagacttaaacagggctcactaccacccattttttaaagcttttgtcacgtgttagctcctttaatcgtcatggtaaccccacgaagcggaaacgattatcctttttatagatgaggaaactagaacatcgagggtgaagccaaagaaggacttaggggcgctgtcgggggcggaggtttcctcgactgacaatgaccatcagatgggaaaaaaatcttcctccctgggatgaaaattagaagtcaaggtggaaagaggcaaatctgctaacggaggatccagtccccgctaccggcctgagcctcgcgttgcagcaagagagatgaaggtcagggctgccgagagaccctgggggccgggagtcggggaagggggcgttgcagcaagagagatgaaggtcagggctgccgagagaccctgggggccgggagtcggggaaggggcgtggctgctgtgggaggaggccaggccccgccccccacgaggggacgagtcatttccgtccgccgaggaaccgaccgccgccggccgggttgcaggcggggcacctcgggcaggacctccctggtcggaagtggccgtgagcccaagccgcggtcccgggtgagtacggggcggggcggaggcatgtgcgaggctctctgcctgtacgctggaaagtggggattgcaactcggggagggatggagcacgcgtcgtcgcctgggaaacgggtcgacccgcggaaggcgagcgggtgggacttccggagcagttaatggtggggaaactttctagtggatgtgggaggaggcgggacttcctgcagcaaattggggctgtgcgccgctcaagcccgtttacctgctccccaggccggcacccaggatgggcgaggtggaggccccgggccgcttgtggctcgagagcccccctgggggagcgccccccatcttcctgccctcggacgggcaagccctggtcctgggcaggggacccctgacccaggttacggaccggaagtgctccagaactcaaggtgagcggggcctgagctggagggggtgtggcctgctgcaaaagcgggaacaatccagagggacgcttggctgctacgcgggattgcagtggtgcagccagccccgaagtcggaaggtgctctctagggagtacaggaagataaagtttgtgcttgatttagaattagctagatcctttgggggagaggggatcgagccgatttcgggaggatgttcactgcgcggatgatgctcaggccatcgagaaatccagaaacaggcgacgaccttcgtcaagagaaaaatgatcctgtggagaaaagtaaatgtcgctaggttgggatggatggtaacaggccaagccccggacctatatctagccacattttttgtcaaggaggaaaccaattctgtagagaaaagtacctccctgtcccttgcaaggaccagtgtcaggcaatcctagtgccactatctggctactgcatgtcaaggagccaatcccatgtagaaataaactgcctcttactccctggatgctatagcctgaagcaggccacactccccagaaatgagggacccaatcacacaaggatgcaaatcctgactccacccctccaatcctcagtggagctggtcgcagatcctgagacccggacagtggcagtgaaacaggtatcagtgcctctgcaagggccagcaaggcctggggatgggatttggggaggaattgcaagccgtcagtgaaggggtacattaggaaaatctgattggggccgggcgtggtggctcaagcctgtaatcccagcactttgggaggccgaggcgggcggatcgcttgaacccaggagttcgagaccagcctgagcgacatggtgaaacctgtctctctaaaaaattagcgggaatggtggcgcgtccttgtagttcctaatcgggaggctgaagcgggaggatcccttgagcccagtaggtcaagggtgtagtgagcagtgatcaccacactgtacttcagcctgggtgacagagcgagaacctgtctcaaaaaaagaaaagaaaaaatatggctgggagagaaggggatgtgtccagtaaagaaagaagtgttgcctgtttcagtggggtgggtacctgtccaagaccttagaaattggacaaggcggccaggcgcggtggctcacgcctgtaatcccagcactttgggaggctaggcgggcggatcacccgagatcaggagtttgtgaccagcctggccaacatggcgaaaccccatctctactaaaaatacaaaaattagcggggcatggtggcgggtgcctgtaatcccagctactcgggtagctgaggcaggagaatcgtttgaacccaggaggcacaggtttcaatgagccaagattgcaccactgcactccagcctgggcgacaaaacaagcctatatctccagggaaaaaaaaaaaaaaaaaaaaaagattcggacaaggctgaaaacctgtaaccgttccaaagcccgttccaaagtgaagaggtggggcctaagggtctgatagtggtggagaagggctgatttttccgctgggtatttgattggaggaagctcccggtgggggcggagccagtcccagctcctccctctctttctgcagctgggagttaacccctcaactaccgggacccaggagttgaagccggggttggagggctctctgggggtgggggacacactgtatttggtcaatggcctccacccactgaccctgcgctgggaagagacccgcacaccagaatcccagccagatactccgcctggcacccctctggtgtcccaagatgagaagagagatgctgagctgccgaagaagcgtatgcggaagtcaaaccccggctgggagaacttggagaagttgctagtgttcaccgcagctggggtgaaaccccagggcaaggtgagggccacgccgagggctgtgggagccgccacagactgggacccaatcccacgtttgttgcgtgctctcaactttttagcctctacttacttttctgagaaatgggcctaatgataaatgcagggatcgttgtaagcagttaagcagtggggagaatgatatatgtcagctcctgcgttacccacagtgaccacccagtaatcagcaatgaccatgactgtctcagtaggagctattacgatgaggattttttatgtccagagagacttgagttcaaatgctgttaccaccacattctgagtcccatgtgtctcatctctacgatgctgaatccataaaaaaagcacgtggcatagttcctgacatgcagttagcacccaaagctttgctcctgcttttattttcacggttattagcccaccgaggtggtgaaggccaggggaagaaggaggctgggtaagacattaacccccattttaaagactgtaatcctggggctggcgtcataaggagtaacaggagacagtaaggttaagatgtcgggccccactcagaggcatcacggatgcttgagatggaggtgctctgtgactcggtttccccatctgtgagatggcagtgataacaccctgcctggcagggttggtgtgagtcagcctgtgagtgaggagggtcagaggtatcacagtgctgctgtttgtctttccttggtgacaccaggtggctggctttgatctggacgggacgctcatcaccacacgctctgggaaggtctttcccactggccccagtgactggaggtgataagaggcaaaacaagggagtgagtgaggcctggagtccacctctggccccgggtcacccctgccgcttcatacctgccgtaggatcttgtacccagagattccccgtaagctccgagagctggaagccgagggctacaaggtatgtgcagccgcctgtctgcatgggcacgtgcacgtggcggtccgaccgcagtcagaccaaggccctggtgagcagagcgtctggtgacaccctttgctccccagctggtgatcttcaccaaccagatgagcatcgggcgcgggaagctgccagccgaggagttcaaggccaaggtggaggctgtggtggagaagctgggggtccccttccaggtatggctggaagggaggctgggagctatgtgggggcacagagatccagagcgagggctttagactccagggtaagcggggcggaggcctcaggcagtgtgatgctgataggaacccatcatcagctacaaattctgggctggggtggcatccagtaggtgcttgagggggagctaaagctggtggccccctcccatccacaggtgctggtggccacgcacgcaggcttgtaccggaagccggtgacgggcatgtgggaccatctgcaggagcaggtgagtcttgcagcctgcccggcccccctccttttcctcactccagcccctcactcctgggctccccggcctccggttggggcctccttactcctctgtcctctctcgctccctccttctgttttttgctgtgacatcttagatgttggtttacgagaccagtgctttcagactttctacatcagagtagtagggaagctgttcattccttcgttcattcgtttgtgtgtgcatttgttctgaagtttagcgcattcttgagctgaaggtatcagtgagcgggacggcctgctccagcagggccctcacggcgagggcggtgactctaggcggatgggcagactggcgtgtaaaacagcaggagggagggagctggagaaagcaggcatcacccgtggtgggcagggatggcctctgaggaggtgacatcagaggaaaaggcctaaggcagggaaaggagggagccaggtggacacctggggaaagcggtccccccccttgtgggagtgacagcaagtgcaaaggccctgaggcagtccctagcctgggctagttagggacagcgaggcccatgcggctggctctaagcgaggga

SEQ ID NO: 97651 - DNA, 23624 bp, Homo sapiens
gcccagcccaggagcttcaaacaggggttgctacaaggggtgaacaggggaccagggggtgggacaaattctgcaaagggctaggaatgtgcagggtggggatgggaggtgatctgaaccctccaagcctcagtttctccactggagggcatgccaaaacacctgtgccttgcccagagcaggtgttctataaatagagacgctcctggaaaggagaggccttctctataaggcactaggacacatggtaaggctgcaattgttaaaactgcaaggctcgtgtccaagaactcgcctcttgaggttgaggggaggattcagttagcttatgggtggaaagcagcatccatgctggagggcttcctggaggaggcggctcagagcccttccagctgccctccctacctccccacatttgcccctcaccggcccattctcctcatctgatgaccgcgcctctgtcctcttctccttgaagccccagacgggcacagacacaggcagggacttggcgtactgctgtgtgggtagggctgaggctgggggcactgagcaggtgggggggccggcgggggtctcctcgctcaggctgccatctgaaagagagggtggacttcagcttctgtccctgcctttgtgtcggccgtgtgcctgcccccaggtcgggaggggaacagcctgggacactcaccatctgtactctcggggtctgactcacagaaggggggaaggtcctggagggtggcgtcctcatccatcacaaagagccctgtggatgacctgagttagaggcccaggccaggcagcacctagccatgctccatgtgtcctcctcctcagccacggccactgccacagccaccatctccacctccctgaagcttctgagacccatttccttcacctcaaaaacaacttcctctagcagcctgcctggtcatcggcaaaaaccaacccagtttctatggatctgccaccctctcagctgcacacaacgggctgctaacatgaaacctctacgatctgttcgggacaatgtgactcaaaacacagccttagagaaacatgggatgactatgacctctgtttcacaaatggagacctggaggcccagagaagttaagtcacttgcccgaggtcccatggctactaagggacaccaccaggatttgaactcaggatgcctgcccttcaccctacacgggttttctccagcaatggtgaggaggcctgccattggtaataacaacaaacaaggacctcctagtgactgatcaaactcctactaactccgcaaagccctagcgttacagtccagcctccgggaagtgcccgacccccaaattccccccaaaacagctggctgctccctccctggcttcctcagatgttggctgcatcccagacaactctttaactcctgcttggcctcccaggcgttgtggaaacgactctggttctacccatgacctgccccagagcctcccaacccccaccgggactccagttccttggctagaccgggagccccttgagaaaaaagcccgagcctgctctgtgtccttgtgcccaccactcccagcacagagctggccccaggaccagtaaggctcagagcagggaagggactggctttagatcacacagcaagccccaggcaagcctgtctggctctggggtcctgagactgcacttctgtagaagtactctgggctaagcaggcccccaccccgacaaagcctcctgcgggcacctcaagcgctgggccgcacccgcccctgcccccaccctctcacctccattatcactaatgcccagctgctccccggaggtctctgtctctgtgggctcatcctcgtcctcctcgttgtcctctctggccagggtaggccggggtgggctgggtgtgggactgggtggctgtggtgctggtgggggcgcaggaggccgagcagcagtggcagccctgtgggccagtgcgatgtcgtggaggcaacggcgcgctgcctccgccagggctcctcgaccatgggcagcataggcacaggggcccgggcggggtggtggcggcggggccgcggtcagcagcaccagctccgtgccagtccgggcccggaagcgctcagcggcccccaccacggcctcccacagctcctcggggcgccccgacgccatccgcgccctgcgggccagagcaggacagagggggctgaggcttggcggcctacatcatcgccacccactcagagtgcccgcccgtcccctggatggcactcaccaccctccacccaccttgtcccagcggtgctgtgtgtcctccccaaacctgctactccccaggattctcaccatccagtcctcgcaggcccagaccctggcgacgtcctctgccccaacccattcctcctgccccaagtcactgtactccttcccctttggccctgccctggcctctgtgggagccgccagccacatgtgaacagggagtactggaaaggcagggagtcctagcagagagtcctagcagagaggcctctaacaataaaacctgcactgggttctgaagactgagtacaataaagccgaacgagccgggcgtggtggctcaggcctgcaaccccagcactttgggaggccgaggcaggcggatcaccgagcccaagagttcgaagccagcctgggcaaaaaaaaaaaaaaaaggaatttcatctgctttttttactcttttaacatggtgtctagaaaatttagaattccacgtggggcttgtgttgaatttgatggatgatgccaccctgctccgtcgcccagccatcccgtcaagagtgtcctgcacaaggcccagggggttccttcagcacccggagctgatgctactcctcgccatagtcctcagggcaggccctggaggctctaggtgttctggccatccccagctcctgggccatcctgcctccacggccttccagagcctctgaggcccgaggccttcagaaaacgtggtccctgaccttgatgacttgtgctccattccccaccaacctttcactcatcctagggtggaagaaactttccctcgcccatagatccagccagtctgctccatagggggtcccacactgtctgagtggccaccttcccagcacacttccttccagagggaactggctggttctatgactgaggcctcagagagtcggggctgaaatggtgctggcgctgctctctgtgctgggaaatccacacggcttttcctacaagactgttctggcaggtcctctgttgtccctgatcccccagggtgcatcagatgacttcaggagcccatccgatgccctgggcttcctccatgagcattcatgtcacctgagcttgtgatagctgtaacctggctgcctcctgcatcagactgtgaattcccccaaggtcagggatttgtgtttgcaggacaggtcgaccctaagcagacaatgcagggtgcgtctccttactgggtgagaagagcgagggcaggggggctgggtccttgccctgactctgtctcaaacctgctgtgtgaccttagatggctcactggccctctctgtgcctcattttcttccccattaaccagcgtggttgagccagagctgctgggctgcggaagacgctcttccgggaggcagtaagcacaccgccactgcacggattcaggcacagctgtggtccagcccaccagggtgaagggagcagggagtctggagtctgaatgaaatttgcaggccctttatgactcacgatcattgatgttggtgtttgctgagcacctattcagtgctgggattccacacctggcatctcacctatctgactcactcagggagttcaaagccccaagggaaggaagaggtttatccaccacctcccagaagccacgcaaggacccaagatgggatcaaccttctcatcccaccctttcacctacactatgagacaggagctttagttacagttcaccccattttacagttgcaaactcaggcccaggggcagtcagcatcttgaagggccacaactggaagaggcagggctgggacctggactcagaaagtctagatccggggcctgttctaaatcctgaccgccatcctgcctgcctttaggagggcagatattctaatccagatggaaaagtgaggctcagagagcttaggacactggcaaaaaagcacacagctacacagggcacaagtggggctgaaactgtgaggctcagagagcttaggacactggcaaaaaagcacacagctacacagggcacaagtggggctgaaactgctgactgcccagccccaaaaccccactgaactggggggtacccggtgtctcaaacacacccatgtccttcccagctgatgagggaggaaactgaggctctaagcaagaaatggctggtccaaagtcaactgcctcgccgtgctaggcctggggctctcacttccacgggcctccagcccctaatgacatgcggagaagagggggagaggaggtcccggaagagaacgtcaggatgaactctccgtgtactcaatcttggagtagccacgggattaaagagtgaaatagggtgagtgagttgtgagggctcccccaactcaggagacatgagcaaaaaggacagggcgacttccacaggcctctttgccaaggtccaggggcaccctgtaatgctacccaacaggagagtagccaagacctgggggtcctccttacccttcagcttctagaggaggtcctgtttcctccaaggagctgagagatggaggaagaacccgtcccgatagacgagtttcgtgtaagatcagggagagattagaggaaagtgagacgtgttccccacaggagggggagcacgatgtggctgtcctctttggatgcagggaggagggaaaagagctaaggaggagaggggtggaaccacccctcctgtcgaaattttagtaccccacaccccaagatgtgaggaacctgagcatgaacgcggtagccatggggtgagcgcctggggccacgctcagctgccccgagacctcccaacctcgcccggggtccagggaggacccactggtctaggaagaaaacaggaaatcccgcccagacggaggccaggaccggaagtcccgcctttggacgggtgaggggcgccccgaggccccccaaaccatcccccgaccccgtggacgtggtccacggcccaggtagagatcccaggcgctctggaaccgcaaggtgagactgtctacgatttgcctcaggtctgacaggacgattcccacgggcgacccccttccagcgctcagcaaaggatcgctggcagacctctgccctctgatctgtgcaggccatacccctcccgtgagccgctcgccctcccagcgccccgctgcctcaggacggccaaatcctccccacaccgcggttaacaacgccgcctccactcacgtgcccgtagccagcatggccggcccggcgccgtcaccgccctcaaaagacatggcggcgccttgcgtcacgtccgcgcagttgccccgcctcctctccgcacactccgcctcccttatcggggccgcccgagatcaagatggcggccacaggggcttcatccgaaccagttgacaagggtgacgacagcttgcccctaagaaaaatggccccgcctagagcatttccatttgcccccaacaataatggccgtcctcatatgctcaatcatgaccacagtaaacgaaggcaagcgacctgacgtccctgacccacaataaacttcttcgacaaaagtagaggaaatcggtgctcgttaacaacatggcagccaaccgggcttaatcagcccatagtgtatattggctctccctccctccaacctgctcccattcggcacgaaggctggcaaagatccaacacggcagcatttcttgcttcggtttgccaggcttcaaaatggcggctcagcccgctttctcgcgacggtgactcagaaattcgtccggggccgcttcgtttctgggggcactgacggcttcatcccgttatcctgagtccctcagtgcctcttgtggtgtacagctcctctcacctcctcttctcttatccgttcggctcttccagctgtcgcgccccgcagagagatgggacagccccgtattaacatggccttagctgaccggcttaggccatgccctcgagcaaaatggtacctccttggcttcaattccagtatacaatatggagaaggaagtgggcgtttcaaggcgtgcttgccccaggtggtgcagctctcagaccctcccacttgtttacttcgtggcgagagggcgaacactgcgcctgcgcactctccgtagccggatccaccttcagcgtctgcgccacgtgactccgatccaccctcgaggttccagtggaataacccccttctgaaaaatggtttcacccgctccktctctagaacgggtcgggccgctaccactgtccggcccggaggggaactgttttctccggaagtgacaacacgctgactaggaaaaggaggaggcggggcagtggggccttcggcggcgactatggaaggagccggctacagggtaagcactgaggacgcattccctcgcttcagtgtatgcgaaacgccccgtctagtgatcagctcttctctcaggccttggctctcgagaatccggcacggccttggcaaacaccgatctcttataaacgcgccgtcaccctcccgtccaccgccccagggaagaacctcccatggccccgcccccccggctcaggcgactccttgagccctgccccctgtggaacgcacgtcagcwtccgaacgcgggctggaccattctccccgccttggtcccggggcaatggccctcccggccccgccccctgagggtggctcctccctgggcccgtccctattggctccccaggctggtcccctsgcttgggccccagccctcgctggttccccccaactcaggtggtgtttgagaagggcggagtgtacctgcacaccagcgctaagaagtatcaggaccgagactctctcatcgcyggtgtcatccgtgtcgtggaaaaggtgcgctgggagggagcagggctcggacccgctccgagcgggatgcaggcggtctgggatgcaggcggcagctgtaggagtttggtctggcggtcagcagtgggacctgaagaaggctgggtgtgggaactggaatgaggggcgggactttgaaaggctgagggtagaaactgggaaagtttggaaatttgcaacggaaagttttgggaatgtggtttggggagcgcctctaaccccgcctccctccttaccctaggacaatgacgtcctcctgcactgggctcctgtagaggaggctggagattccacccaaatcctcttctccaagaaggtaggctccacccgctttgcccttctccactcgctttttttctaggtccgtgctgttgtaagtcatttgmgggacctgcgtacaatcccagacctactcgtggggcatgtgtgaccctgtttaggcttgggtactctgcctctccttttgctcctctctgtgaaatgggcagaggatgcccattcaaggaaaaagagcagggagcataagacgcacggtcgtggggacggctgacccctctctccctttgcttcttgggagatccctgccagggtgcaagatgtggattcgagttgcttgaagggaaatggcatttcctctggtgccagaggacagggcctgacagcctactcacccacttcgtcactgctcccggctttcccttcgttatgtctcctgggacttcccatggctggaccccgtcctgggcaattctgagacccagagataagtcagatccagacccacctaagccctgacccttactcactttttgagaaactgatagatgaggtcgaaaacgctaggaagtgttggaactttttgcacccagacagtctgattccagatccccaacgcttcctgggagagcagacatttgagctgggactcccaggatatgaaaggacaagaaggtatttcagggacagcagaacaaccttcaaggcacacggagaagttggatgcctctgtaggggggttctttagtggggaatgagacctccattggagctgatgagttccacccaggggccggaagtcagtcggcacccacagagctagtgacgagacactggaaggctgagctgaccacctgcgctgccccagggcaggaggatgaagatgaagatgaagatgactctccaccttgctccacagccaaacacagccaaggcaccaggaagttgcgttacatcacttccgctttccaggttggcctgcatctggttggtagaatttgtcctgtgtcctggattccagctgcaaagaaacctgggaaatgtagtgtgttttttttgttgttgttattgttttttttttttttttttgacagtctcactgtctcaaaagagtgcaaagtggtatcttattgtggttttggtttgtatttacctggtgagtacaacagtgtccattgagcactccgcagcctgactgcagagccacctgctgtgtagcatggacctccccatgcagtgggagacatggggtcaagtcctggctcgctctctggctgcattgggtgaccctgagcaagtgctgtactttcttttttcttttttttttttttttttaatgagacagaatttgctcttgttgcccaggctggagtgcaatggcgccatctcagctcactgcaacctccgcctcccaggttcaagcgattttcctttctcaccctcccgagtagctgggattacaggcatgcgccaccatgcctggctaatttttttgtatttttttagtagaaacgaggtttctccatattggtcaggctggtctcgaactcccgacctcaggtgatccgcccgcctcagcctcccaaagtgctgggattacaggcgtgagccaccgcacccggcctgctgtaccttctttgtgcctcagtttccctctttattcaatggggctatcttccagggtagcctcgaggctaagatctgaatccatggccccttactgtctgctcctttcctctcctaaggactccagtgggggtgactcatgtgcttctgaggaggaaccaacctttgaccccggctatgaacctgactgggctgtcatcagcactgtgcggccacagcyctgccactcagagcccacgagaggtaggctgaggtggcggcccttgagaagcacrtgtgggccaggtaggacacatcttgccctcagtggtcacggtcccaagggctttgctgcccacaatcaagaaggccaccagtcaccaccttccagtcccaggagcatggaagtgaatgggaagacaggactgtcccagcccaggtcaacatggccagtgtctctgagactgcagccttgctcatcctactgggctcccggattggctgtgggtgctcccacaccaggcctgcccctgaggttcgaggctggtggggtgacagatgcagccagttagggtgatttgcaccatcctggggtcacacagggtgcaggggacatccagagaaggcacgtgacccctctggggaatggagattccttccaggaagaggtgatgctggagcttggcactgagggactcttgggagttttctcttctggcagagagagcagcccgtgcaagccagaggcaggcggcccccgtgtgtttagggagccgctggcctttcattgtagctcaagtgtgggattttgagtgaagaaaggttggaggtaagataggcaggggcgaaggacagacccgaggggcctcgagtgccaggttgaggaatagggcccttaccctgcaggtcgaggggtgcctaggaaggttctggaaaggtacatgtccactgggcccccttcccatcttactcatttgtgcttccaaggaatgtgaggccaggggcagaggggtggcttgtggcggggccctcaggagatgcctgtgccgaaggaacatcctgggttgtggttgataaggctgactctggcttcccacgcgcttcccccaacacagtgccgtctccctaggtgcagagcccagctgcccccagggctcctgggccttctcagtgagtctgggggagctaaagtccatccgccgctccaagccaggcctcagctgggcctacctggttctggtgacccaggctggaggttccctgcccgcactgcacttccaccgcgggggcacccgcgccctgctccgcgtcctcagccgctacctgctgttggccaggtgagctctctcccagtgctgggccttaaaccgggcccagtcccaccatggctgcagcgtgacccctcggggctgtgaaagaaacacaactcacactgatttaaaggcaggcaaagagttgaccagcacatataactaaaaagtcaaaarggagtattgatttcaggcaggacccaggtcccaaaatgttagaaacagttatcctttttccctctgagttcgttattctctggggccccagtatccgtggcttaacaacccggctggatagaaggcacctctttccccacgttccaacgagatcccagagctgcttctcattggctcgtccctgagtcagtcacactggaccggaaggtgaaaggccctcattggccagccccgagtcatgtgcccacccctgggatccagctgtgggcctcctttaacagcattccctgaaatgaggggttgcccaggggtggttgggacgctgcagctggaaccgatgtcggccgagcacagacagcctgggacactgggcccctacctgtgcatcacctgtgcgtcacctcccgcctcccagctccccgcaggactcccgcctctaccttgtcttcccccacgactcctctgctctctccaactccttccaccacctrcagctctttgaccaggacagctccaatgtggtgtcagtgagtgtccccagcaggaggcctggcgggtgtgggcagggagggacgagaaggggcgggccgtgacctccctttggcctcgtccccagcgcttcctccaggatccctactccaccaccttcagcagcttctcccgagtgaccaacttcttccggggtgccctgcagccacagcctgagggagccgcctccgaccttcccccgccacccgacgatgagcccgagcctggattcgaggtcatttcctgtgtgagtagtgagtggaccctycctgttatttctggccgtgtctccctgggcgcatgatttcatttccctgggcctcagtttcctctttggtaaaacggggatggtaatgggacaccctcagggggtgcatgaggaaagcgctcatggctctgccagacactgtgagcacctgctcacccttattgggggacccctcctaactgggggatgacttggctgctgagccccggaagaggctgctgcctgcccctgaatgttagtcatccgtcaagctaataagctctctgagcttgtggactgaggctgggttgggtccccccaccaccccgccgagccccaggctcatttgctctttgcctgcaggtggagctggggcctcggccaaccgtggagcggggccctccagttacagaggaggagtgggcacgccacgtgggccctgaaggtcgcctgcagcaggtccctgagctgaagaaccggatcttctcgggggtgagtgccaggacaggtggaagaatggggcagggccagaacaaggccccactgagctgcctgccctcctgcacccccagggtctgagccccagcctgcggcgygaggcctggaagttcctcctagggtacctcagctgggaaggcacagctgaggagcacaaggcccacatacgcaagaaaacgtgagtyctcaggaggccctgccctgccaggcatgacacctggtacctcctagggcaccaatgggcaagttctgtggacgctggttgtgaacctgctgtatctgggcaccatcctgcgcctgtggaatacggcaatgatcaagccagacccatcctcacccctgtatggtctgtctccattgcagttttcattcctgtgccatactgttttaatgatcacagttttgcagcatgttttataacctaggagggcccgtctctcctcattcctggtgtaggttatatacctgccaggcactgaggatgcagcagtgctggacgattccctgtccctggtgccctgtccagtggggggtgacaaattttcatcaaaaggccacaaggctatgtagtgagagatgccaggaaggtgaagtgtaagggatagtggcaagaatgacgaggtgacctgcttgggtctgtgtggtcagggaggggctctgcagggctgacctgggaggtggcgccaggcttggaggtctctgggtgttgcagacagtggcggcctcacatcttgtttccctctgtcactcagggatgagtatttccgcatgaagctgcagtggaaatctgtgagccctgagcaggagcggagaaactcacttctgcatggataccgcagcctcatcggtcagtgtcaggggtggcacttagggtggatgggagcagggaaccacaggagggcctcaggcataagtgcgagtgggagatagagggagccccctgcctccccaagaccagtgagagggcatcttgggggaaagctkcatgggctgttggggaatggccctgggggagcaaggccagggacaggatgggaaagaaggggagcccagctcccttcaggcccagtctcagttctgtcaatgcctggtgatcttggcaagtgattttgcctccctgggcctcagtttcccctactgtgggaggatatagccagctggtgagtgggaggcctggcgcctcacagcaggagcatcagtgatagtttctagaaccagctctgcttctcccccagagcaaaccccgaggctgggggctgccagcaggaggagcagtgggggctggcactggtggccagcagggatgggcccccctacctttctcacctttgcaccctgtgcccggtccccgcagaaagggatgtgagccgcactgacaggaccaacaagttctacgagggtcccgagaacccggggctgggcctgctgaacgatatcctcctcacctactgcatgtatcacttcgacctcggtgggtgccaggcctggggacgggcgtggccggggctgtccaggggagcgctgcgggcttggctgcagcctgaccccatgtccccccaggctacgtccagggyatgagtgatcttctctccccsatcctctacgtcattcagaacgaggtggatgctttctggtgtttctgtggcttcatggagctcgtggtgaggcttgggtcaggggtgggacacaggcctatcgagcgatcaggtgtcctggtacctcacggggtctgctctttcccccctccttccgtcccacagcaagggaactttgaagagagccaggagaccatgaagcggcaactcgggcgactgctgctgctcctgagggtgctggaccccctgctctgcgacttcctgggtatgtctctcgggagggtgggcaggagacaatggggccatagaccttgccagattctctggtagcagccacagtggcatcctggacattgggtcctgatccaaacaagagaaacatccccacacaacctagaatgtagaggcagaattgctgtttgaagcaaaacttcaccaaatgcagacacgcaggaatgctgactcaccccgtcctcatgctcacctagatcctgtttgggctttgcctttggcttaacctgcagggtatttttcagaaataaggacctaggcattcctgccacttcttatccccacctggctgtggctcaccttgaaccaggaatcagagactggttctctgggccctggggctgggggtgctgcatcccagctttaacatttttattcttcgaccaggcacagtggctcacacctgtaatcccagcactttgggaggccaaggcgggcggatcacttgaggtcaggagttcaagaccagcctgaccaacatggagaaactgtctctactaaaaatacaaaattagctgggcctggtggcacacgcctgtgatcccagctactcaggaggctgaggcaggagaatcgcttgaacctgggaggtggaggctgcagtgagccaagatcacaccatggcacttcagcctgggcaacaagagcgaaactccatctcaaaaaaaaaaaaaaaaaaatatattctttattacttggtcaatgtaaaaactgcaggaaattaagatgaagaagaaaaagtaaggctgggtgtggtggttcatggttgtaatcccagtgctttgggaggccaaggtgggaggatcacgtgagccaaggagtttgagaccagcctgggcaacactgggagaccaaaaaaaattgggagactacaaaaagatttaaaaattagcctgggcgcaatgtcatcctgggatcacgcctgtaatcccagcactttgggaggccaggcaggtggatcacttgaggccaggagttccagaccaggctgggcaacatagcaaaactctgtttctactaaaaatacaaaaaaattagccagccgtggtggcgcccacctgtaatcccagctgttgggatcggctgaggcacaagaatcactcgaactggagtgggggaggtagcagtgagcagagattgtgccattgcactccagcctgggcaacagagtgagaccttgcctcaaaaaaaaaaaaaaaaaaaaaaaaggtcgggtgtggtggctcacgcctgtaatccagcactttgggaggccaagataggcagatcacctgaggtcaggagttcgagaccagcctggccaacatggtgaaaccccgtctctactaaaaatacaaaaattagccgggggtggtggcgagcacctgtaatcccagctactcaggaggctgagacaggagaatcacttgagccaaggttgcaccactgcattccagcctgggcgacagagygagactttgtctcaaaaaaaaagaaaaaagaaagttaaagttgctgtttgatatcattgtttttcttgagtgcagatggtgatgataataagttaaacttattcatgaacatttcctcgatgctttaggacccccgggggagggagctgagatactctgtcctcaccttactgatgaggaaactaagccatagaaaagcatcacctcctagggcacaaggacagaggctgcctctgggtcattcaaagtcttctgaaacatcacttttcttgactgcgcggcattgtgtccacctgcaagatgtggtagatttgatgtaacttgacctgctrgagattcgggtcctttgcagtttttcatcacggtgcatagtctgggtaatttcttctttaggttcacttccaagaagtggaattttgttcaggacagtgcttgttttcacacagctttggagagtttgtcctccgttgttactttcctcaaaggttagaatgctcagactctcactttcatttgagttaacttggggggaaaaaaaggttcaacaccagcttaattttttttttctttttgagatggagtctcgctctgttacccaggctggagtgcagtggtgtgatctcggctcactacaacctccacctcccgggttcaagcgattctcctgcctcagcctcccaaggagctggaattacaggggtgtggcaccatcccagctaatttttgtatttttagtagagatggggtttcaccacgttggccaggctgtatttttagtagagatggggttttaccatgttggcctggctggtctcgaactcctgacctcaggtgatccacccgcctcaccctcccaaagtgctggggttacaggcgtgcgccatcgcacccggccttcagcttaaatttttgctaacagcgtatctaggagtgtcagttcccttagcgctcaccagcagcgggcagaggtctgtttcgtcgggcgtgctgggcgtcctgcctcccttccatgtccatggcagatgtggaagtataatagcacacttcctctggagagtgggaggaaggaggggcagggcccgcgttcagggctgctcctgcctcacctccgaggttccccagccaggcataagtcacttgcctagacttggggaaggtcttccagtcaggatgacttctcaaactctcagtcccagcgctgggcaaggctgagtgggctccatgtcatcccccagattcccaggactccggctctctctgcttctgtttccggtggctgctcatctggttcaagagggaattccccttcccggatgtccttcggctgtgggaggtgggccagccagtttgggcgagaggcctgaaggggtgggctcacctgccctgggaggttgggcggagagggacagaccctggtgggacctcaggcccaggctgggctatgacctccctccctccctctgtcccgcaccctcaggtgctgtggacagggctccctggccccaatctgcacctgctggtggcctgcgccatcctggacatggagagggacaccctcatgctgtccggcttcggctccaatgagatcctcaaggtgaggctccggccccgcccccgccctgtcccccctgagctgggcgctgcccagggccgcagtacctccggggagcaggtgtttagtgtgggattattgaaagcctggttagttgggagcgcagtgggggtggggccgcgtaggtttcccttctgccccatgccatgcctgctcccagcaaggtcctccgggcaggtgggtggggacytkccctccccgagtacgtgctcagaatgctcccggaggcctgagaagcatgtctcgcccagcgcacttctgagcccccagagggccagcccggtgtgtcttcattgtttcccagcacgaagcacagagtgggcgctcgggcggaggtggttgagtgccgactggcgcctgacccaccccctcccgcagcacatcaacgagctgactatgaagctgagcgtggaggacgtgctgacccgcgccgaggccctgcaccgccagctaaccgcctgccccgtgagtccccgtccgccccgcagcgccccgcccgaaccccgaccgacccccgcccccttctcacsttcaccttccgcttttcgcttctctcatcccgtgcctccaggagctgccccacaacgtgcaggagatcctggggctggccccgcccgcagagccccacagcccctcgcccaccgcctccccgctgcctctgtcgcccacccgggccccgcccaccccgccgccctccacggacacagccccgcagcccgacagcagcctggagatcctgcccgaggaggaggacgagggcgccgactcctaaccccgccaggcagcctcgttctgcacaggcactttagcccgagccaggcacacctgcgagggggcaggtgtgctccgccgccctgctgataagctggcttcattaaactgacacttctcatgtgcagttggcttcttgttggtggggggaaggctgccaagtgggctctgacctggttgaggaggggatggtggctgggcagagcctagggtgaatgattggggtttgtggaggcagggcttcctgagttgcctgatttgtttttttgtttgtttgttttatgagatggagtcttgctctgtcgcccaggctggagtgcagtggcagatctcggctaactgcagcctccgcctcccgggttcaagcaattaccctgcctcagcctcctgagtagctgggactacaggcgtgtgccaccacacccggctgatttttgtaattttggtagagatggggttccaccatgttgcccaggctggtcttgaactcccgacctcaggtgatctgcctgccttggcctcccaaagtgctggtattacaggcgtgagccaccgcgcccggcctgatttggggtttttggaagaggatagggtgctctgggctgtggcggcgacctggtagctgtgtgggaacacttcccggacataaccaaggtggaagggcctgcagagatgcactctggggagcctgccctcccagctgctgcttgtgagaaaaatcacctcctgttcagccactgtcagctgggctttctgttacttgcattagggcccatctggacttcagcctcgtgacagaggtggtcgctgtgattgccatttcccggtggtgcagggcgtccttccggttccctctgtgcgcaccaccccccaccctcctctggagccccactgtccaggaagaagtgaggggcagatttttgggggggctccaggatgggcgtggcgcctgctaactgcagggctagtggttccgatgcaggcaaactggggaagtaactgagccacgggggaggctggaccacacggctttttccgaaaatactttaatgcgaggtcctcgtgtgggtcgtgttttggagagataactggccttggactggagggtggctgccttcttcctttgccaggtcatgcgaggggctgctggccaccccatgcacatgcccctgcccctccatgtcagatgcgtgcccctcggggctggccgtgtccgatgcaggccccttccggctgttgatcttgatggcggcgcgcagcgccgacttgaccgccgtctccacccagccgtgcgggtaggcggtgtgctcgccggcaaagtagatgcggccataagggaccgtccagtcatccttttcggtttgccagagcgccggcggctgtaccacaaagccaccctggctgtgctggtcctccgcccaacgcttgacgacgccggtgccgtcccagagctggcgcacgacaggcccgtgcaatgccgccacgtcgtcgagcgccaagcgcaacgcctcttcccggctcaagccggcgaacgctgccgccgcgtccgaccacgtgtacgaggccagcagcagcgcgccctcgcgcggcggcgggtagaaaatcatgcgcgacgggcgatcggtgtttgagtggccgccttcaatgtgctcctcgcgccagaagggcctgcggaagcttaggaacaccttggtggccggcacgtagtgcagcctccgcagcgcctcctgcatgtggcggggcagcggcggcgagaaggtgatgcgcttcaccgccggtccgctcgccgtcagcagcaccacgtcggccttcagcaccttcagattccgcgccgggggagaggtctcgatctgcacgtgcacatcgtgcggtccctgggtcatcgccaccacgggcgcgttcaacagcacaagcccggacagcgagctcagcagcgcgcgcggcagcaggtcccagccacccacgatgcggctgtacctgcaggcggggcggggcggggtgggggcgtgacctgggctctgcggccctgcccctctgccttgccccacccaccccggcagctggcccttatggcaccggcccgctcccccgtcatccacctctcccgaccccgcccgtccctgacatcccaaaggccgcaggagtagtggattgtgtcaccagggaccccaccacttctcccctaggccgtgtcctttatctgggaacccttagccccgcgaccatcaattaggccacgcccttcacaacagccccgcccccagacccagaggctcctcccactccctgctactttccctgattgccccccgccccccccccctgcccgccagccccgccccttactggagtctgtcgctgaggcagctgtgggcccggagggcctcggcgaagctgagatagaagaagccatcctcggacatcacgtctcccagaagctgcacggccggccggctcaggttcccctccccgagaagatattcctgcaggttgggcacaggccgaggttagggcccaggcaggctgcacccctgagagagcccctccgcagctgggcctcctggtcccatgacatgtccttggaccgtaggatcctgtccccactctctgacagatgagggaaacggaggtccagacagggggcgtgtccagcccccgggtcaggcaggaaggcggtggcaggactagggtgccaggtacccgccttctgactctctggggaaggcctcatggtcactctctttgccctgcatctcagcagaaccaagatccccacttaccaagagcgtgtgcctttcaaacttcttcatcgcctttctgcagcccagtgccttgaggtctttgagggcctgttgtggaagaagcagacatggtgctgagctgcccgggcagccagggtggaggccgggcctggagcccacactcggcttctcctcgtggttctgcccacggctggccattcaccactctcaagcccctgggcttttgcccacaccatgccctccgccttgccctccacggcaactcagatgccactgctcctccgatattaccgaactgttaacgccgcccatcccccctcattcggctggcccggctggtcacagctcatcccggttgcgtgttattttgcctatttttcagccagccagccagactgtgagctccatggaggcagggatgtgggcagctggagaggagactgggagagggtcccaggcgtgctgtgtcctcccgggggctcagtgattatttgttgcctgaatcactgtggccacggacagaagctggtcccctgtgccactggtcagtgctgacagggcatgatggctgagaagtttatctaccgtccgtcccctgcccacagccctcctgtagctccccagtgcctggagccacagaattcttgcccctcagcctcatgttcaaggcccctgctagcccctcaatgtcttttttttttttttttttttttgagatggagtgtcgctctgttgcccaggctggagtgcagtggcgccatctcagctcactgaaacctctgcctcccaggttcaagtgattctcccacctcaccctcccaagtagctgggattacaggcgcctgccaccacacctggctcatttttgcatttttagtagagacagggtttcatcatgttggtcaggctggtctcgaactcctgacctcaagtgatctgcctgcctcggcctcccaaagtgctgggattacaggcgtgagccactgcgtgccaggtacccgccttctgactctctggggaaggcctcatggtcactctctttgccctgaatctcagcagaaccaagatccccacttacctcagtccatgtcttttatggcagctctggttctgtgaacagtgtacagtgcccagaccacctgccctcagggctctcccacctacacatctggcacctattgtttccctgcctgtctttgcgtggcacatgagtgcgtgttcttcagcactttgttcgaatctcaccccctcccagaagccttgctgcccccatctaatttcagccttcttcttggtccacctggcttcccccttctggccaggacctcagagggaaggcagtgccccttcactcactcatgcatctcgcatctctcagactcccaaaccagtcagtgtcaaggcatagaaatgacctggacatggcccccatcctggtctagaaggggagatgggcaagtgggctctgacctgggtggggaggggatgttgggtgtggccagttcctccctaaaggtatcagggaaggcttcctggaggaggggacattggagctagttcttgagggctgagcaggagttcctgtgtggggaagggaaaggcattctggaaagggagggcgatacacaggtatagtgggtgtgaggaacacagagctgggggcatgtggaccaccatgaggacaaaaatttcttagaggagaaaagagcatgaggctggaggggtgcagaagggaaggccagtcagggctcaaagctgagcctgaaaagatcagactttgtcctggaggcagcggggagccactgggggctgtgagcagcatcactctgggtgtgtgggaagacgtttctggtaccaggctggggagactagagcctgggcagcttgagaggaggctgggggagggtccagggcagaggaggaggcctgagctggggcaggcagaggggagcagggcacaagcgtcaggcggcaggggtgggcactgatggtgggggaggtgggcgaggaggaggtcaggaggaggatggctcctaggggtctgcccgtgactgcgggatggtggggccatcgtgagatgggggcaccgggaggaggaacaggtttaggggaagcttctgagcccagtgtcctggggagggacacagatcagggtctcgggaggcagatgtctccatcagcccatggatctatgtttaagccagaggtggagactggggaggttatccaggacagtgtgtgggtgaaaggggaagaggccaaaagctgatgcagctttggggtcagcagtgtttacggggaagctaaagaagggagttggggccgggggcagtggctcacgcctgtaatcccagcactttgggaggctgaggcaggtggatcacgaggtcaggagttcaagatcagcctggccaagatggtgaaaccccgtctctattaaaaatacaaaaattagctgggcgtggtggcgggcgcctgtaatcccagctactcgggaggctgaggcagagaattgcttgaacctgggaggcggaggttgcagtgagctgaaatggcgccattgcactccagcctgggtgacagagtaagactccatctcaaaaaaaaaaaaaaaaaaaaaaaaaagaagggagttgagagatgacccatatgtgtagaagcccctgggctggcccattctcattctcggatttcagtgagtaggtcagtggttagacctcatggcacacatccccttggtagaatttccatctccaccaacaggcgccccaccccatggaggggactgaagggatgccagagagaagaaaagccgggccggggcgagcttaggaggaggacagagaagtcagggcgggaggagggtgcaggcggtacccacctggttgagagccatctggtagatgtcttcgggcgagtggcccttttcctggggacgcaaggcgtagcccagcttctcgggcaccttctccaccacatagttgcgcagcttcacttcgtgcacctccgtccacgtgttcttgtcgtactgggtgaacttggtcaggttgagccccaggccctggcagagcttgtggaggatcctgatcaggggagtgggtgagtgagggccgggctccagtgggggtggcctggtccctagtgggacttggagaagaggggtgggaggggagagtagctggggaccagcatgaggctgggggtggggctagatttggggtaatcaatgctgggggatgggaatgaaatggggacaaggctggaggcctcagggcagtaccaggattaggattgggttaagagtgggatagagcccagattagaattgggaagggggacagagtttgggttggacgggggtttgag

SEQ ID NO: 97652 - DNA, 20774 bp, Homo sapiens
gacagtgcccagggtcaccaggcaggcaggctttgcaggctccagggtggccgcagagcccctttaccaagacccctccagccccacgtggaggggagcctgaggcctggaaggagaaggaccacttgcccaaactgttcataggcaaggcagggggcctgggttctggctagtctttgtgtttcctactctgtgacctttgcgcctctcccagcctgtgtcttggtctacaacacggggacagccatcacccaccaggtccctgggcagaagtgaggaggtgtcagctgccccctgcagtgcttggtcttcatgcattgagcacctgagttgtatatagctgcacagatgggtaaactgagaccctgagcgggaataacaaccatattgggtcagagggcacccaacaccagacacgcacaagtgatcatagcaggaaccagtttattggttgaggtggtggggaacaggggggttggaggcacaccatgaggagcgagggctcaggtctccccagggccctggaaatccatgccctccaccaagtcctgcaggtaggccttgtactggtcggaggtgagggagagtgggtggctgttggaaatgtgcaggtccacagtattctccagggaggaggcaccccctacccgggccatttctaccaaggccctgaggcacgtgggcacaacctgcaggggaagtggggacaggagtcagggaaaacacccagccactgtccaccaaggtaggagtcagggcttggaggactacaactccctgcagcccctgctgtaacctaggatgaaccataggcctagggctgctgggagttgtagttttacacacacacacacacacacacacacacacacacacacacacacaccccctgctgtaactgaaccataggcctagggctgctgggagttgtagttttacacacacacacaaacacacacacacacacacgtcagggctgagcagtctgtgatcttgactcctgggagccacagccatggcctcacaatggcagctaaaacttgagtccaccagcttctacatggtttagagcaggggtccccaacccccctacggcttgttagggaccaggttgcacagcaggatgtgagcagcgggtgggggaatattactgcctgagctctgccttctgtgagatcagcggcagcattagattctcagaggagcacaaactctatcgaactgcgcacgtgagggatcggctgctccttaagagaatctaatgcctgatgatctgcagtggagcagtttcatcccgaaaccacacctccctgtccgtggaaatattatcttccatgagactggtccctggtgccaaatagtttgggggccactggtttagagagttcaaaacaggttctgcaggtgaggccatgggaaggagctcccggggatgaaaaactggttattgcagagatcttggaagttgcagttttttagagggccctctgggagttggagttcctgggagcaacctcttccctctgtaaggccacccctttcagccccagggactcaggtctgcaggcaccttgaccatcacgagcctcttggtccacggctggtcctggggccatgactcccccacacagaaccagagggcatagcgtggtgagcgtccgcttccttccgtgaaggtaatcagatctgggggcccaggagcctagtcagggatgagaagaggaccctctacccacccttccccgtaaacttgaatgataacccccaccacctcccctgacctaaggccctctgctgcctcgaccaggggactgcttgtttggggaaagtcccctccttccctccctccctccctcccatcagggtggggttgttggaaggccacacccccaagcccccaagcctcagcattcataacaggcccagagtagggggcccatgctcccaaggatgctcagtgaatctggagaagctggttggcattcagtcctgtctgaggctgcattgtccaattgcagccattagtcatgtaaggttatttcagtttaaattgtaaccaattaaaacgaatcacgtcctggttgcactcgcctcacctgagtgcttggcccctgtggctagtggctgctgcaccggacagtgcaggtgactgtcatttccatcatggcagaaagtgccactgcacagcgaaaccctaagggatgtagctttcctgctattggtctgttcaccatcattagttacgatgatgatgacagtggcagctaattccctgagcaggctctgtgtactgggcctgtgtctcaccccagcgctggcaggcaggtagagagaggagaccatccttggattccacgggctcagggcaaagtcctttgcctcggttatacagcgggccaagggcagccagcgtctgaattcagtcctaatcatgagttcttttttttttgttgttcgagatggagtcttactctgtcaccaggctagagtgcagtggtgcgatctcagctcactgcaatctccgcctcctgggttcaagcaattctcctgcctcagcctcccgagtagctgggattacaggcacgtgccaccacgcccgactatttttttgtatctttagtagagatggggtttcactatgttgaccaggctggtctcgaactcctgaacttgtcatctgcccacctcagcctcccaaagtgctgggactacaggcgtgagccaccgtgcccggccaatcctgagttgttaaccactgtgcaggctgctttgtactggccaggtcgaagcccctgtctcactcacctacaatgaagggccccaggtcaaacacgcctccttccttgtccttggggacctcgccatcaggcccatgcccgctgttggggagcagctcctcgctcactgcccagtatgtgtggcagtgccccagccgctgggcccagagccactgcccggcccgccagagagccagtcccccacccaggcagctcagcacatgcctcacgtagctcatcactcccctgtctgtcagggacatgccagggtctggcagtgtgactggccatccaggcagcgtcctgtctcccacttcggaccccaccagccgcaggccctccgggcaggagatggtctgctggaagacttggcggccccggtagaaggctgtcacctcgaactcccactctgagcagcggcagcagcggcatgaaggggagaggggttgagaatcaggggctgccgcccagacctcagccctcccagcctgcagctgacactcaccttcccccggcaccaacagccgcttcagtgggttctcagagggccccaggtttgggaagggagtgggattgtccaagctggggctccgcaggggctgagggcagggctcaggggctacagccaggcttgggggtcccggatctgggagtggggccaacaccatgttacccagtaactcatccagaatgtcttcctggagggaaacaaaaaaagagaatcaggcatttccatatccttttctggagacttcatatggaccaggtctgttctcagcaacgcagggaggtcaggcttgagctctgccttcaaggggcttccagcctggggacagagccagccatggcatcaacagccaaacaaacactaatgaacgccaggtgctaccattccaacccaaggatctggctctatgcaggtaagacctgggcaaagcaggctgggtagaatttcagaggggatgctcccccagcttgggcctcagcaggatcaaggtgagggagtttttcagttcccaagaggctgacagccccctgcgaatcgaaatccatgaaatcccgggaaggtgtgctcgggccttgaatgctgggtgaagacttggaattttctcctgaggagaccggggcagggacagacagggtcagcactggctcaggtgaggggcaggctggaggcaggggagtggggggatcgtctagagggagaggacaaggcccatggagacaggtcggagactgaggggcatgaaagttgggcacattctcacctgggtatcagaagtactgcctccaccattggtgtccggagaggtgtctggctgggaaaagtccccaactcctgttgagaaaagtggtgaggggagtaggagtgccaggaacccttggggccccagcctcccacacgaaccccaagctggcagacctgagttcacaaactcgtagattttatgtgggtcgtgagggtccttgctccggtcctctgctaaacgcaacccttctttgcggttgagggcagagcggaaattcctcttccaggttggcaggtctggcttatccctcccgggaacatatgcaccagtggcctcggcccaggcctggggcaacagtggtgtcaggatggtgggggaggacgacttagatcctgctcctggggccctaaccctgtctcccgagtcctaacaccaccctctttccctggcaagttctaactctgcaaggtccatccccaaatccccccgtcccacctacctccatcccccacctctagttttcaaaaggctttttttctttttgagatggagtttcactcctgtcacccaggctggaatgcaatggtgcaatctcagctcactgcaacttccgcctccccggttcaagcgattctcctgtctcagcctcctgagtagctgggattacaggtgggcaccactacacctggctaatttttgtatttttagtagagatggggtttcaccatgttggccaggctggtcttgaactcctgacctcaggtgatccgtcctcctcggcctcccaaagtgctgggattacaggcatgagctactgtgctcggcctcttcaaaagcctttgaaacctctttggtttttgttttgtttcgcttttgtttttaaagagatggagcctatgttgcccaagctggcctcaaactcctgggctcaagcgatcctcccgccttggccttgcaaagtgctaggattacaggtgtgaaccaccgcccccggcccaaaaaccttttctttctaagccaggcttccaagtccaacttggtgtctaatcccgtgcaccacctgccccgcgacaccctctgtgataaccccgcccctcacactgtttaccacctctggcatatactaattcggtagttaggaacctcagatttggggctccaggcctcacctctgatgtttcaagaaccatcccccagtatctatcctacaaccaagagccccggcctctagaaagccccaaacccccaggatgcatttcctttgcgtactaaccggctttcccggttttattcccgtaaccctgcagctccaaccctgcttgcgccccaccatcagtcagcggatccggctagccccgcccctcccgttctagccccacccaccagcgttggcacgagcccgcccctcgcgcgccacctccgccttctcagccgggcccactaggagtcctttccgcccagcgcgcagctccgggtttccagcgtcccaggtcgtcgcacgcacctggaagattccgaaatcctcctgctgtgcatcctgccgtaggccgtgcttccaagggatgcggaagcgcgtgcggctcttgttcacccaggccacgccctccagttgccccaggtccagctgcgacaccagccagggcaggatccgtggctttggggttcccatggtccggcctgcgcgtatagggcatttcctgggcgcgaccggcctcccccggacccacctggcctggagtttccgcacccagacctccttctcacgggccacggcacaggtccttcacccatattttcgggggtacaaacaggaaacctcctcttcccatcctcccatcctcccgagaggctctctaatcagctagggttccttcccatatccatggcacatccttccccagcgtcttcagtgcagaccctccactccctcaattccgccagtatagacctcctccctcccccacatcatcgaaagtaagtatccccactttcagggtagcatcctctttccctagttatttcagtgcagaatcgattcacgtgtaagcctctacctcctgcacttaccccaatgtagacccccttccacagtccccctacagaagatctcccaaaacatttccaacacagaacttccattcaattcccctccgactgcccgcctccctcctccaggacagagcacgccccaggtttcgagactgaactacccccatctacggagtccacccctccctctctagaaccccctcagtgtagacgcctcctcttttcctctttcctccctactttttctagtttttctgcagccgacctccagcgtcggccactgtagctccttccttgctccactttccccagagtacacagcctgcctttccactctccgtgcagacccatcctctttcccgctcctcgctctcggacgccaccaacgctctcccrggctcttccgcgttacctacgatggaaggtcggggcgtgcgggcagctggaacccmcccctgtcttggrgctccgggtagctctcaaactcgaggctgcgcaccccctttcccgtcagctgagctctagagcgctggggctttcttttygatcgacttcttgaaataaaaccaactttatcattctttgggtaacagacccaaaagccgatgggacggcccgctgggctgttcccgcccctatgcccttttttgggtttccggccagaggcatgctgggagcgtcacatgcaaattgagcgtgcacccagcgttccgccctttctacgctgggccggttatcgacccgkcccagtgcgcaggcgcgggaaagttgaactaataaagtttgtacgagttcagtggaggagaccgcaagttgagtggaggaggcggcggtggggccccggaccaggtcagcggggtgttgacgaggggtggggtgaggagggaagaggagggggccgggatccagtggtgggcaccccagtcccgcttctctgatatccaagggtccagggtcctctagattccagcaggggtcggagatttggaactacacctcacagcaggctgcgcggcgaagaagcgcggacctaggggaagatttgccctgaaacctcttgggattggtagttcccgatgctttaagggtttcaggagtttggcatatgcctcttatagaatccaggagttggggcgctaagcctcttcttcctgggagacctaagggtctggggctccagttcctttttctctaagactcagaagtccaggaccccagctccctcctcctttagacccacgaatctgggcacccagccccaccacctttccttggatcgaagagtctttttcctgatcgctttttcgtctgaggactcaagagtctaggcccccagacccacactctccaaaggacccaggagtccaggccctcagcaccttccttgggactcacaagtcctggtccccaagcctccacttcttgctaaacccttggagtccagtccctaaccctctctctcacaggtgcctccatggcaggctctgaagagctggggctccgggaagacacgctgagggtcctagctgccttccttaggcgtggtgaggctgccgggtctcctgttccaactccacctaggtaagaggagtggcccttctcccccaggggccagcatttgaggctccctcctaactcttgctcctggtctcagtctgtctcctctctttatatctggctctattctctgtctttggggttttggagagaggtcctcagcgsgggagggagggagttggggaaagagactgcttgcaggggatctctggtggggtcagtctctgaagtcctcctctccagaagcyctgcccaagaagagccaacagacttcctgagccgccttcgaagatgtcttccctgctccctggggcgaggagcagccccctctgagtcccctcggccttgctctctgcccatccgcccctgctatggtttagagcctggtaagagatttccatgatcatctatgaagccggcagaacacgggataaggtgctagtttaagatcactcagctagggggtggctgtgtggagtctctagcaccagccttcaggacagaaccgtcctgtcctctcccctccccagttagatttctgtcaattctgtgggttggctttcagagagcatttggtcaatctggttgttgtctctttccttccataactacttccctgcccctaggacttttgtagccaggaatacccctgatagaggggcagaagggctggttttcaatcacatctccctggctgttttagttgcgtgactctggggaaaatgctttctcttccctgctcccctgtttttccaatagcagagtaggaattggggaggaggtcactggacttgatcaaggtgacccacaagtttcctcataggtgtgaacctggacagactagtaatggctgctgggagtgctagcttgaaaaggggttcacagcttgggagaggaagtgctgtgatcaattggtgatgtctgtagtgagtgagggaaggggatactaacagtaatgtcttgtgtttgccttccttggatgagatcatcttcaaggtctagttgagctctgacagtcttttggagacagattgttgctctgtcacccaggctggagtgcaggggtgcaatctcgactcactgcaatccccacctcctgggttcaagcgattctcgtgcctcagcctcccgagtgactgggattacaggtgcacgccagcatactagctgatttttatacttttagtagacacggggtttcgccacgttggccaggctggcctcaaactcctggcctcaagtgaccctcccacgtcggcctcccaaaatgttgagattgcagacgtgagccaccgcaccctgtcagctctgacattcttttttttttttttttttttgagacggagtttcgcccttgttgcccaggctggagtgcaatggcccgatctcggctcaccacaacctctacctcccgggttcaagtaattctcctgcctcagcctcccaagtagctgggattataggcatgcgccaccatgcccggctaattttttttgtatttttagtagagatggggtttctccatgttggtcaggctgctctcgaactcccaacctcaggtgatctgcctgcctcagcctcccaaagtgatgggattacaggcgtgagccactgcgcctggccccagctctgacattctaagtccagtctgaggatctcataaagtgaaaagtacaagggttttggcatttttaaccaagttttctcactgggcctcagtttaccccattataaaatgggaatcatggccaggcttggttgctcacgcctgtaatcctagcactttgggaggctgaggtgggtggattgcctgaggtcagcctgggcaacacggtgaaaccccatttctactaaaatacaaaaaattagccaggtatggcggcgtgcgcctgtagtcccagctactcatgaggcygaggcaggagaattgcgagactccgtttcccaaaatcaatacataaataaataataaataaaatgggaatcattgccacctgccaaggtagttgggggaaggagagaatccgtaagtttccaatgtcctggaaacctgtcattaactcttttcaccccaggcccagctactccagacttctatgctttggtggcccagcggctggaacagctggtccaagagcagctgaaatctccgcccagcccaggtgaggcacagaggagccccagagaaggatggcggtgggaggatagtcagggttctgcccccagccaaattctcttctgcctccagaattacagggtcccccatcgacagagaaggaagccatactgcggaggctggtggccctgctggaggaggaggcagaagtcattaaccagaaggtgatgggcatctgtcccactccttggcaaggacaggagttgcggaatggtggggcactgggatcagaagctggatctgtattttctttggatggtcaggtggaaagaggctgggacaaggtttcaatgaagggttgaggccgggtgtggtggctcacgcctgtaatcccagcactttgggaggccgagttgggtggatgacttgaggtcaggagttcgagaccagcctggccaacatggtgaaaccccatctctactaaaaawamaaaaatcggacaggtgtggtggtgcgcttctgtaatcccagctactcagaaggctgaggcaggagaatcgcttgagcccaggaggtggaggttgcagtgagccaagattgcgccactgcactccagcctgggtgacagagtgagactctgtctttaaaaaaaaaaaaaaaaaagaatagttgaatgacaggggtatggttagggtagtactgtaccgtaaattagttgttttaattgattgtttagaggggcatggcctaaatgcagagggtgtggccatcagaaacattatccacaagagactggccaagctggggaagtaagtgaatgaatgtgggggtggggggagtggctaaaatcttactgagcatagaagggacctggcttagaatgtaggggaaaatgtactaccagaggaggtgtggcttgtggctgtgtcctggaatctgattggcttcggagcttggacaaggtacatcgtcctttaatattaattgaatggtagagggcaagattgttgtagacactaggttggcccctgggaaaggtcaccaggggcatggctagattaactcagttacagtagagattggccctgattggctgttgaggcaagggcctggcatggcttagggactcacgttccaggccastatcccgggggtagtttggcagagaccctggagtctggcttgattggctaatatggatgaggggtggcctagaaccttagcatctagaacgatcctgaaccgggaagccacgcctcccggccctctattggctggccccgggggcgctgctgacgcggaccctgcctcttccaccctacagctggcctcggaccccgccctgcgcagcaagctggtccgcctgtcctccgactctttcgcccgcctggtggagctgttctgtagccgggatgacagctctcgcccaagccgagcatgccccgggcccccgcctccttccccggagcccctggcccgcctggccctagccatggagctgagccggcgcgtggccgggctggggggcaccctggccggactcagcgtggagcacgtgcacagcttcacgccctggatccaggcccacgggggctgggtgagccgctgaagcctctctctccgggcctcactttacctaactgtcatgtgatagaggaggggcggggacttcttaggttcctctcagacctcaggtattctcccagctccactgcgttcgttctgttgagcccttgctgtatgccaggactgcagcgatgagtgcagacactatgcctggcgtcaacgactgggtacgctaatactgtgagcgtgaaaccagtgactgaggttactcagggagaggccggacggggtagctcatgcctgtaatcccagcacttttggaggccaaggcaggagaattatttgaggccaggagttcaagaccagcctggacaacatagtaagaccccatctctacaaaaattgaaaataactagccagggtcgggtgcggtggctcacacctgtaatcccagcactttgggaggccgaggcaggtggatcacctgaggtcaggagtttgagaccagctggccaacgtggtgaaaccctgtgtctactaaaaaaaatacataaattagccgggcgcggtggcaggtgcctgtaatcccagctaccgaggagactgaggcatgagaatcgcttgaacctgggaggcagagattgcagtgagctgagatcatgccactgcactccagcctgggcgacagagtgagactgtgtctcaacaaaataatataataaaaacctggtgcggtggctcacacctgtaatcccagcactttgggagactgaggtgggtggatcacttgaggtcaggagtttgagaccagcctgaccatggtgacattcagtctctactaaaaatacaaaattagcccggcatgcctgtaatcccagctagggaggctgaggcaagagaattgcttgaacctgggaggcagaggttgtagtgagccgagattgcaccactgcactccagcctgggcaacaagagcggggctctgtctcaaaaaataaataaatamaaatttttaaaattaataataattagcaaagcatggtagctcacacgtttactcccagctactcaggaggcagaggagccgggaggatcacttgagcccaggagttcaaggctgtggtgagctatgattgcgccactgtactccagtgtgggtgacagagtgggaccctgtctcaaaaaataaaatagtgagagtagtagtgctacctcaaagggtcgctctgagggttaaaatggggtcaatgtggtaagccctctgtgcactgcctggcatgcaggcattttgttggtgaggttatatggctacctgctgcctttccaacagtgcctgccaggatgccctcccggggaaccccctgcctccgtcctgctccttctggtgggctctggtttcacccccaacgaggccttcccaggtccccattgacaatcacagccacctgcacaccctcccaccgccctccttcccccttcctgctttacttttccttccatagcactttgggccttccaacagatggtggaattgacttgttttacttgtcttctggtttatttttctttgttggtgtctcccacctctaacacatcagcttcaggagacccagaagtcttcccctctccttttcttactttatctccagtgccggtttcagagttggattgggctccagcgtgctggccctgtggcttggcgactgtcgcagtctccctgagcggcactctccccactggtccagtgagcaccgtctcatttacctgccttggggggtcgctgtgggtattcactgagagagggacacaagccaggctctggatggaaccggtttccctggcaggagctggtcaagtgtgtttgaggagcagggaggaggaggccagtagggctacagtagggtgagcgggcgacagatgagaggaggagaggcgccgggccagccaggaccctgtggtcacggtgagtgacaactcggactttgactctgggtaagccaaggtctctgagcagcggagggacaggcgctgatttaggcgctaatgggcgccctctggcggctgcctggggacagactgctgggggcgagggcagaagtaggggcacagggaggaggtgagtggatctcacccaagtcgggggcggtggagaatgctggatttaacttagcggtgaagctgacagatttggctaatgggccagatgtggggacagactaaaggatgctggcccgagcagctgcagggcgacatcttaagttccccgagatggggaaggtgtggggatgggggcgatgggggtggggagcaggactggaggtggtccggtctacagtaagatcagaactcatagcacatgttgaggggaatggatataagtgttgggctcagcaaagaagctcgtttattttattttattttaatttttcagatggagtctcactctattgcccagactggagtgcagtggcacgaccttggctcactgcaacctccacctcctgggttcaagcgattccctgcctcagcctcctgagtagctggggttacaggcgcacaccaccatgtccggctaattttgtagttttagcagagacggggttttgccctgttggccaggctggtctcgaactcttggcctcaagtgatccacccacctcggcctcccaaagtgctggaattacaggctgagctaccacgcctggacaatttcttaaaaaatttttttaaagtaggattgatagcagatgagttttctcggtgggccaggtcctctgctagggatttcaatggaatgatcccatttaaacccactacaacctcatggggctcttattgtcctcgtcttgtgggggcagagaggaaaagtccccagcatgcagagtgttggaatctggatttgtacacaaagccacgactctgaattgttcaaatcccaagactctcttccccatctctgactctgtcccccractcttcactctctctggatctctgtctaatcccactccagtgtcctgaccctcctygagctcaacctttcctcctcctgctaggaccctgccccctcayccctgtgcccttctgtctgggtctctgtccccttgtstgggtgtctgtcaccctccgctctctggttcctcgccttcccgtctctaatctcacagggctgatgtggacgctgctgtatggggggaacacctgccctgctcacagggctctgccacttttcccttccaggagggcatcctggctgtttcacccgtggacttgaacttgccattggactgagctctttctcagaagctgctacaagatgacacctcatgtccctgccctcttcgtgtgcttttccaagtcttcctattccactcagggctgtggggtggtggttgccctacctgtttttgccaaaaataaattgtttaaaacttttcttattaaaaacgttacaaartattcaattgtctgttcttacacttgggaactaaagttttaaggagaggagatttggttcagagatttctgtggcttacgcaaattgaggaaagaaccagttcattcattctagaaatatttatttgcagcacctacaagagcctgtctcctggacatgtaacatatttgagagaatacctgtaaatattccagcaacttgcatttttttttcctattgcacgatctggttattctagctaatgctgtatgatggtcatggagtctttccagtgaattccacagaaaggtacagtctaacttcacctgtgtctaggacaccaccctcttcttgtttttctcctcccattgctcctttcaagtctctcttgctggtttctcatctacctacagaccagtggtttgtctcacacacaccccccactctccctttttttttggagatagggtcttgctctgttgcctatacttgcactgttatatagatacagtggcactatcatggctcactgcagcctcaacctcctgggctcaagtgatcctcccacttcagcctctctagtagctggaactaaaggcatgcgacacgacgcctagctaatttttaaaaaagaatttttatgggaggccaaggcaggtggatcacttgaggtcaggagttcaagaccagccaggccaacatggtgaaaccccatctctactaaaaatacaaaaattagccgggcatggtggtgggtgcctgtaatcccagctacttgggtggctgaggcacgagactcgcttgaacccgggaggcaagaggttgcagtgagttgagatcacgccactgcactccagcctgggcaacagagcgagactccgtctcaaaaaaaaaaaaattgtagaaatggggtctcccttatgttgcccaggctggtctccacctcctgggctcaagtgatcctcctaccttggcatcccaaagtcctgggatcacaggcatgagtcactgtgcctgggcggtttgtctcctttatagggccatatcccccttcacagagtaatgtttgtaaattaataagtgaaatgtacaggattacaaaccgaaccaattacagttgatcctcagtatttgtagattatttgcaaatttgcatccttgctacaatgtattcataccccaaaaattaaggcagtgcttttgtggtgttttggagggcaatgcttatgcacagagctgcaacaagctaaagacctgatgtgcatatttgcagctgggctcctcttgcttcagctcaaacactggaaacaaatgtccttttcttggtttgtttagtgccatgcttttcaatttttttttttttttttaaagttagagtctcggtctgtcgctcgagctggagtgcaatggcttcatcctggctcactgcaacctccacctcctgagctcaagcgattctcctgcctcagcctcccaagtagctgggattacaggcgtgtgccaccagtcctggctaatttttttatttttatttttatttattttattattttttgagatggagtctcgctgtgtcgcctaggctggagtgcagtggcaccatctcagctcactgcaacctctgcctcccgggttcacgtgattctcctgcctcagcctctggagcagctgggactacaggcgcccaccaccacacccggctaatttttgtttttttagtagagacgggggtttcaccatattggctaggctggtctcgaactcctgagcttgtgatccgcccacctcagccttccaaaatgctgggattacaggcgtgagtcaccgcgcccggccaaattttttttttttttttttttgagacaagagtctcgctctgtcacccaggctggagtgcagtggcgcgatctcagctcactgcaagctccgcctcccgggttcacgccatcctcctgcctaagcctccacgcccggctaattttttgtatttttagtagagacgggggtttcaccatgttagccaggatggtctcgacctcctgaccttgtgatccgcccgcctcggtctcccaaaatgctgggattacaggcgtgagccaccgcgcccggccgcctggcgtaatttttgtatttttaatagaaatgggggtttcaccatgttgcccagactggtctcgaactcctgatgtcaagtgatccgcctgcctccgcctcctaaagtgctggaattacacccgtgagccatcgcgcccgaaccctattgtaaattttaagtctcaggcgtttgccagcggcacgccagagagtatagcctgcgcggaggcccagaaaccaaagagcgagctcattccgggattggagagaagtgtgagcagagggaagtagagggatcggggagaggaggggcaggacccacgcattcggccctttgcattcagcttcattcaactaggaactttttctgcaaatcaaggaaagcttcccggaggaagtggtgcctaagctgtgctctgattcacgtttagaagctgaccagacaaagagaggtgggcgttcctggcagggggagggacttggcaaaaaccaagtggcttgagaggggttgatggttttaaaaaacttggaatgattatgtcaagggctagggatttaatgtgttgacgacggactcctattcctcacttgcttcgggaccccagctatgcccttcctctctctgggcctctcaccgattccgtttttcccccaggtaatgagcacaagctccctttttcctccagactccccccgggttgggaggatccaccgagtggacgaggagtgataattcctttgagccaatcgttggtgcctgaagccccgccttcttccctacccgtgggccaattgccgtgttctccttgaggccggccgcttggcgagggtgggccaaaggctgcgtgacgtcgcttccggataaaccaatggcagcgattaggaggcgggtcgttttggtgatggacaggtgtttcaagacgcccctttagcgcggggctccccgggaagctttgaggcggtgctgggtgtaaaggggagggcattcctggtggattttgcccaatcaccagtcgcgcttcttgcaatagacgggcagttttccccatcccgggtcgacttgagggggcgggattctggacgccagagttggcaaacccctgacctatgatggacgtattctctagccaattactagacggtattctcagacgggccgcctccattgccaatgaaatcttccagcggggtcgcggtaggcgggccgtggaccctctggtataaggcggtcccgggggagtgaggagaaagggggggtcttggcggccggaggaggagtaggtgcgggtgaagatggcggcagccgaggccgcgaactgcatcatggaggtgagcgcttggagcgccgccgtgggcgggaggcggctttgggtcggtgtttcacgcctctgtggtggggaaagggctctaagttggcgatatggggttggaggtcccccgccgcacacgggggcgccgcacgttccacatccggggatatcgtttgaggtgacggctccctagcttccaagggccttcggcatccggcctagcggagggtcttatcccccctcccacgtggaggagggctgggggcgcttccggccaggcccccacgtggccgctgcgcggtgggtggggagggggtgtgccgagtccagtggcccggcggctccacgtgcgggacaaaggccccgcccccggccgggaaggggcgcccaggggggcggggagggggtccgaccctcctgacgcccccagccctcctccccggggacctgggcacacgccgtggggtgtgatcgacctggggccctccacgatgtggggagtctcttgggaggagcagtgcttctcagccctttaccaacctccttccgagctccgggggcatctgttgggatatcggacccggttttgtgcgttctgggttagggactggaggaaaaccaagaatggggtcccccgccgaccccgtttcccctcccagaattctccccctcgcccagggctttaggagttgggggatggggcatgcccctgtgacctccctctgggtggtggtggggcatctagatagagattttcccattaataggcgccgtgcacccccttgtggccatttctgggtgtgtgggagggacatctttttcatggggcgtgtcctgaagcccacctcccctcggatttcttcctggcgggcggagggaggagggtatgtccgctgggaaggagttgtgggaaatatgtaggctgagagctttaccctactggagccgtttatctcccccgggtctttgtgagggtgcgagatgacctccttcttcctgaagccctgtgcagggtcctgagccctggggtcctgagagtgggtgcctgaaatggtttcgagtgaggtttggttctcgtgcagccatgtgggggaggtttcagtcttgcgtttcaagccctctggggctggggttgtctggcggtagttttcagtggtattgagaaataggcccgagtgggaaaccccctcagcacctttcttcttataggcatccccgctagcttgggagagctggagggagggtgcttggagcctagtaggtcatggcctgtgacgtggcccttcttggagacttggatagtggtcacatctggaagagatgtaatctgatggggcctctgtccttccaccccttacctatggcattggctggaggggcaggtcagctctcagctgtcaggatgcagctcccaggggtcactgtaatgacttcccaccctcttggctgtctcctgcacctggggctctatggatggaggaaataactttcccagaggtggcctcaggcttggccgcacctggaagtcttcagggcctgggatgggtgtctgaatgggggcgatggcctgactccccaagccactttttttttttttttttttgagacggagtcttactctgtcacccaggctggagtgcaatggcttgatctcggctcattgcaacctccgcctcccgggttcaagcgattctcctgcttcagcctcctgagtagctgggattacaggcacccgccaccaggcccagctaatttttgtatttttagtagagatagggtttcaccatgttggtcaggctggtctcaaactcctgacctcaggtgacccacctgcctcggcctcccaaagtgccgggattgcaggtgtgagccaccgtgcccccaagccactttctggagtcctctcattcttagagggtccaggagctgcccatcttccctgggaccctaccttcgtgggcagagggtcataagggagggggttggttccagctggttttgtttggggctcctgagtccaaggcaggagctggggtctggggtactagctctggggaagtacccgtgtgccacacctctattctggaatcctctcagacatgagactggtttgcagaggtggcagatgccctgtgggcatatcctgccagccccgctcccttctgctattcatggcaccctaggataggggtgtgtgtgtcaggaagtgtcacctaatctggaggagattaggtgatgagagggagcgacagctggcggtggtgggtgccaattcccctggcctggatgggggaggtgtgtggtcagctgcctggccagagaggggcagcgtgggggtgggccaccatctctccagccacagctgggataggagacccccctttcttctcccctcacttttcccaccctttcttaaacaccccacctcattacttgcccccttcgccaccactccccaccaagaaggagaattgctggaaacccaccccccggccagagcccaggttccgccacccagccctcccacagccactcccagtagctaatcctttttccctgttactctctcctagaattttgtagccaccttggctaatgggatgagcctccagccgcctc

SEQ ID NO: 97653 - DNA, 26146 bp, Homo sapiens
  misc_feature (1)...(26146): n = A,T,C or G
catatccgcccatcaaactcgcagcaccaccacaccaccccgctgcagtcctgccagggagcgagttcccaggccagcacctaggcctcgacccactccagcttcagctccggctgcaattcctgcccttgttcctgtcccagtttctgccccagtacccatttcagccccaaatccaataaccattctccctgtccatatcttgccttctcctccccctccttcacagattcctccttgttcttctcctgcctgcacccctcctcctgcctgtacccctccaccagctcatacaccgcctccagcccaaacctgtcttgtaactccttcctctcctctcttgcttggtccaccttctgtgcccatctctgcctcagtcactaatctccccttgggcttgaggcctgaggcagagctgtgtgcccaggcattggcatctccagagtccctggagctggcttctgtggccagttcagaaacctcctcactttctcttgtgccccctaaagatctgttgccagttgctgtggagatcctgcctgtgtcagagaagaacctttctctcaccccttctgcacccagcctgaccttggaggctggcagcatccccaatggtcaagagcaggaggcaccagattctgctgaggggaccacccttacagtgctgcctgaaggtgaggagttgcccctgtgtgtgagtgagagcaatggcctggagctcccaccctcagcagcatctgatgagccacttcaggagccactggaggctgacaggacctcggaagagctgacagaggccaagaccccaacctccagcccagagaagccacaggaactcgttacagctgaggttgcagctccatccacctcatcttcagccacttcctcgcctgagggtccttcacctgcccgacctcctcggcgtcgcaccagtgctgatgtggaaattaggggtcaagggactggtcggccaggacaaccaccaggccccaaagtgcttcgaaagctgccaggacggctggtaactgtggtagaggaaaaggaactggtgcggcggcggcggcagcagcggggagctgccagcaccctagtgcctggggtctctgagactagtgccagcccgggaagcccgtctgtccgcagcatgtcagggccagaatcctcccctcccattggtgggccctgtgaagctgctccttcatcctcactgcccactccaccccagcagcccttcattgctcgccgtcacattgagctgggggtgactggtggtggcagccccgagaatggagacggagcactgctcgccatcaccccacctgctgtgaaacgtcggagggggaggccccccaagaagaacaggtctccagcagatgctgggagaggtgtggatgaggcaccctcatccaccttgaagggaaaaaccaatggggctgacccagtccctgggcctgagaccctaattgttgcagatcctgtcctggaaccacagcttattcctgggccccagcctcttggaccccagccagttcacagacccaatcccctcctgtcacctgtggagaaaagaaggcgaggacgaccccctaaagcacgagatttgcccatccctgggaccatttcctctgcaggggatggcaactccgaaagtcggacacagccacccccacacccatcacccctaaccccactcccaccactgctagtttgtcccactgctactgttgccaacactgtcaccactgtcaccatttcaacgtccccacccaaacggaagaggggccgacctcccaagaatcctccatcacctcggcccagccagctccccgtcttggaccgtgacagcacttctgttctcgagagctgtggattggggaggcgacggcaaccccagggccaaggggagagtgagggtagttcctctgatgaggatggaagccgccccctcacccgcctggcccgccttcggcttgaagcagaaggaatgcgaggacggaagagtggagggtccatggtggtggctgtaattcaggatgacctggacttagcagatagcgggccaggcgggttggaattgacaccacctgtggtctcactaaccccaaaactgcgctcgacccggctgcgtccagggtctctagtccccccactagagactgagaagttgcctcgcaaacgagcaggggccccagttggtgggagtcctgggctggcaaagcggggccgcctacagcccccaagtcccctggggcctgagggttcagtagaggagtctgaggctgaagcctcaggtgaggaggaggaaggggatgggaccccacgccgacgtcctggcccccgccggcttgttgggaccaccaaccaaggggaccagcgcatcctgcgcagcagcgcccctccctccctggctggccctgctgttagtcacagaggccgcaaggccaagacgtgagtgggctgcccctccacctaggctttccaccgtggccactccctccatgaccaggcctgactctgttaaccactacttgaagtcttgagggggaaagcctccagggagacataggggccttctcccttcttcccaccaaagtagggggtaggcaactggttgtcatggaaatggggatcatcacagtccccttccccttcaccccacgtggctgggcagtgttaagggtggcaagatagtctctgtccccacccccttgtacttgattccccagctgtctttcacacagccccccacccttaggggaagggggaggggcttctctacaatgaggtttttttcttttttttttttttttaagaagaaaaaataataaacttagtttctgtatgagcatccgcgtaaggaggcttctgattttctggtctggtggagggttgggtgggaacttgggcatcgtttttctcctccctcttgttcttgcaaagatcctagcacctgatctctagcccaggactatatgttccaggcagaaatctacccaagaagagggaagattggtgaatttgatgtggtagggtgcctttccccagtcagtttgaagtcacagatatccttttcctctcatttcttttccctcggttcctagacgttcctcggagctctttgatgcctcagacctttcccttttatccctcttgctcaggtgcttcctttcacaactttttccagagggcaggcgtcctagctccagttgctccatcccttgggccctcccctgctcttcatctagccaaactggtttgagtcagccacaccccttcccagctccctgggctcttcacgtggtggctggccactcaaccccacccctgggcttggcttggagccctgagtcagctccatcaccacccaagccaaaccaaagctgaggcaggagccgaaactcagagtccttcaaggcctatagccaggtaagagccctgttcatttttacattctctgttcactccctgggccctccttgtgtcctcctgttgactctgtgcttacctcatctgagttatttctttgtatctacttccctgcagcttcttggcacacatcattctttgctctctacttgtctcgcccctttcacctttcctgtccttcgttacttgggttcagggagccaaggtggtttcattttgtctgggttgtaggggaatggttggagataagggtagaaaggtggtttgatgccagggcctagaggacctgagaagtagggagacaagaaatgattaagtagggcatcattttgcaggtttctgtgtggtaatgaggtcatttagactcagtgtactagtctgattgtgttatgtggcctgggttaaattggagagaggaggtggcagggaggcagcatagcagaggaagccctgacttagggaagtaaagtctttctgatgtttggttttagtggtaataaagggcttacttgggtacattttccttacctttctccattcccataactgttttcatgtaaaatggctgctttgcttgaaacgggttgcagtacctagggtcctgctctctgacatctataatactcagggggcagcctcttgggaatttgggggaattgtagagtcctttgaaatacagattaaaataacagattcatagcagctttcaagagtttgtatttttcctccttctcggtgtgcacctgtcatttggcttcttcccacttgttgaaacactaaataatacagataatgccttgtctacactggcttgctttcaaagactcagaacctcaagcttaggtaaaaggattccagccacacatttcctctcctgctctgtgagtcactagaggaattccccagtaaggcaacattcctgagtgccaggctaggccatgagaacagaatgctctgagaggggtggagtctgagcaagcaaggccaagggctctgttgttgggctcacaagtaccttgactatcgcccacaggtgatggaggacgaggagaaggcagtggagatcttgggcaacacggaagctgctcatcctccatcccccatccgctgctgctggctccgcctccgctgcttggcagctactagcattatctgtggctgctcttgcctgggagtcatggctctggtgtttgccatcaaggtgaggagtgcaattcccatgggaatgggggtgggtataaggcaatggtttcatgtatctgatctatctacattgaccagtcactgaatacctatcagtgctctgggcctagtgccagaaataagaataagacagggttccttgtcgtcagaggacccataatctaatgaaagaggtgacagtgaaaatgggtaattaatagaatgcagttcatcagtaccgtaatacaggaagcacaggacagtgtgggagccagggaagatctatgtatgtaattatatatgtgtatatggtagaataggtgactggaaaggcatcctaggagaggtgacaggattaatcttaaagggtgagtgagtaagtgtggaagggcattccagataaaaggagcagtgtgtacaaaggcctgtggagcatgactggaccagtgaggaatagtgagagatgaagctagaggacccagattcccaagggcctccagttctgtgcttaagagttttgactttatcttgaaagtactggggaggcattgaatggctcctgcaggggaaagtgacatggtcagatttgagttttagaaagatccactctcaaggcctacatcgagggtgaattggagggggcaaggctggaggccgctgaacggtgatgagcgcaatctctaggagtctgaaagacacttgggtttttgagagggcttcaccatttcaaaaagcctattagaaacagcacatgtccgccgggcgtggtgacttaggcctgtaatcccagcactttgggaggccgaggtgggcagatcacgaggttaggagatcgagaccatctaggccaacatggtaaaaccccgtctctactaaaaatacaaaaattagctgggcgtgatggtgcgtgcctgtaatcccagctactggggaggctgaggcaggatcattgcttgaaccacggagtcggaggttgcattgagctgagatcatgccactgcactccagcctggtgacaaagcaagactctgtctcaaaaaaaaaaaaaacaaaaaaaaacagcacatgtcctttaggaaaggctacacaggctaacttaaacttcatgctggaatcttctcaaccctagacatattttaacagtcagaaactgtaagaactcctgggttccattagggcaaaatcctaaaaagggcccttaatgataacaaagaggctgggcgcagtggctcacgcctgtaatcccagcactttgggaggccgaggtgggcagatcacttgaggtcaggagttcgagaccagcctgaccaacatggtgaaaccccgtctctactaaaaatacaaaattagctgggcgtggtggcacgtacctgttatcccatctatttgggaggctgagacacgagaattgcttgaacctgggaggaggaggttgcagtgagattgcaccactgcactccagcctgggtgacaggagtgaaactgtctcaaaaaaagaaaaaaaaaagatggaaaagatgaggcccattgggctatgagaatgaggtggtgtttgggcatgagtgaagttactctagcctcactgtttcttgccaatagttacaaattctgaatcaatcttggatagttggaaagaatggggaataacagaattggaaagtactttcccataggcgatcttgtgagctatggccaccctgagaagtaggcagggcccagagatgggtaccttattttgcagatgagaggttagaatcagaaactggaaagggaggtagagggtttggatgtgagattttgatccgtgacagggaagggggagcggagtggggaaatgggcaccttggggcagaagcagggggagaacctaaccaagaacctgcccccacaggcggaagagcggcataaagcaggccggtccgaggaggcagtgcgctggggggcccgggcccggaaactcatcctggccagctttgctgtctggcttgctgtcctcattctgggtcccctgctgctgtggttgctctcctacgccatcgctcaggctgagtgaccctggatggcctctgctgagagccagccgagacctcctggatcctgcaatgcggcattgctaaggtcctgtgacagcagtggttggaaggatcctggttggaaggatggggactctctcaaggggctttggaagagctcttctagccctttataaaaggagggcagcagctgagactgatgagaggagggcagcctgctctgttctttcagggccccccacccccatctcccctaccctagcccaccctagggcctctacccagcgggaggggttgaagaccaggcctggttttattagaattcattttgtaataaaagccttttttagtggtgaaatactcctgtctaattgttctcctcctgctttcccttgggcccttggtgagagccagactggacatctgactgatagcagaagccagcatccacctcatccaggagctccaagagaaggaaacaatttttattttcttcttctggaagtttcccttcttggaaagaccccagcttctcccttgtacgtccacagagactctgaggccaagagtagtagcagctgctactatttattacttactatattccaggctgtgttctaagcactttatatttcttaacttcctccagttttcagtcactcagtagrtgtctgtactatcatatccatcatatgaatatatcacatatgataggtaccaactatctgagtgaaaactggaagaaatgttctaaaatgacagtgttctcgttttatacttgaagaaacaaacagatttgcacaaggtcctcagctactaaatggtagagctgagactgaacccagacagtttggttccagagctgagagaggagtgaaagagttgggtaacagcaacaaccatcctgtacatggagatttgagtgattaaaatggattttcatatcttttatcttggacctcataatatttcaaattttttttaaaattatgaagtatatcatacatataggaaaatacccaaaacaagtatacagttcattaacacaaagcaaacgtgaataaccacattcagtaaagaaattggaacactgtcaacacttcamagcctcctttatactcctcccaatcactgctacttcctttcttcccacaggtaaccaccattctgacttctagcagtgtcatttaattttgtctgcatttgaactttatataaatggaatcatgtattcttttcatgttaacattgtgagattcgtcaatatttggaataggtgtagttttcattgctgtgtagtattcagtcatatgaatgtatcacaatttgtccatttactgttggtggactttgggatgtttgcagtttggggttattatgagtcatgccttttggagtacgtctgtcctggcaagcaccttaccataattcagagtccagaagagcacctaaaggaactggagatgttgcacactgaagagactagaggggaaggagaggcacatgatggctgtcctcagtgttcccaaatgctccaggaagaaggaagagaatagattggtggtctcagaagttagaattgaaacagtgggtagaagataaatatacagggcagtgttctcaacatagcttcacagtggaaccacctgggagctttaaaaagtagttaggcctgggctttatccagactacattctgacttaatcggtgtgaggtacagccttggcatcaggatttctcagtttcccaattaattgtagtacacatagtttgagaactactgctctatagataagattttattgtattccctctgcaatttctaaatcaggaaaaaagggtaacacattttagaaagtgtttttgtttttttgtttgtttgttttgagaaggagtctcgctctgttgcccaggctggagtgcagtggcacaatctctgctcactgcaagctctgcctcctgggttcacaccattctcctgtctcagcctcccaagtagttgggactacaggcgcccgccaccatgcccggctaattttttgtatttttagtagacgggatttcaccgtgttagccaggatggtcttgatctcctgacctcgtgatccgcccacctcggcctcccaaagtgctgggattacaggcatgagccactgcaccgggcctgttctttgtttttttttttttttaactcttaagttctgggatgcaagcagaacatgcaggttcgctacgtaggtatacatgtgccatggtggtttgcttcacccatcaacctgtcatctaggttttaagccaccatgccctgctaattttcgtatttttagtatagacggggtttcaccatgttggccaggatggtctcgatctcttgacctcgtggtccacccgcctcggcctcccaaagtgctgggattacaggtgtgatccaccgcgcccggcccaacgcatagatcttaagtgtgcagcttgattattattatttttttttgagatggagtctcgctctgtcacccaggctgaagtgcagtggtgtgatctcactgcaacctctgccttctgggttcaagtgattctcctgcctcagcctcctgagtagctaggattacaggcgtgtgccaccacgcccggctaatttttgtatttttagtagaaatgggatttcaccatttggtcaggctggtctcgacctgaccttgtgatccacccacctcagcctcccaaagtgctggtattacacgcgtgagttaaccgtgcctagccgacgaatgttttaacgtaaataaacctgtgtagtcagtcactcaccacctataggaatataacatttgcagcacatcagcaagttccctcatgctcttcattattatttttatccccgatattgacctatggaaaccctttcaatctggttcctgtgtccttgtgataagccccgctcattagtaatgtctggcacaaatcactccagactcaccttgtactttccctgctgaagcctagaaattggccatttctcctgaaaagacttagttccttttattgggtactgttattgagaaatcagcatctagacactaggcgttctactgggaagttactgcttagggcattctgaaagcagaggtaagagccagtaaatagttaatgttatctactttacatcttttaaaaatctttttaaaaattccagtcaatcatagggttctttctccactttccccattccagattccagattcccacagttaagaaccttggcttccagtcacatcaatatattgattactcagcttcagaattattatcctgttatattaccaaacaacaaatctaagtaaagttcaagattttttgcaattttgcctttagattgatggtatagagtcatagtactctataaaaagttacctgaattcatttttcttccctcataattgtaatcccaaagtgtcatttctaagatagctgtagggagataagttaattcttttcctctttggctggaacataacctccacagggtaggggtgtgtgtgttgtttcattgctctcagtctagttcctaggtcttagacggtcataaaaatttgttagtgaatgccaggtttgagctatgcactgagtcactcctggcagaatctaacaacctggtgggtttagaacagagtgtgatacaaggcttttgggagagggtggaagattgagaaagtgtgtaaatcccagatagtaaacgctagggctttggatgtatttaggaggagttgaagcggacacagaaaaggcttcctctggcattttaagtccgaactaagaggccaagctggagtccaagctgcgtgtgtccaaatgttttaagggctggagtgtactcaggacaggcgctttgggccaggctgctaatattgaaaagagcttgctgggcgttgtggctcaagcctgtaatcccagcattttgggaggctgaggcgggaggatcgcttgagccccgaagttcaaggctgcagtgagctatgatcgcgccactacactgcagcctcagcgtgggctacagagcgagaccctgtctgaaaaaagagaaaatgctgaattcagttagggatgcttggaggagaccgagggaaccctgctcaagtctgggaactagaggcgcgggaaggtcctgcttccccgccacccagagatcacgtttcccagtaaacccaacttccgggtcccattccaggcctccaagcccacgtgacaacaagctccgccctctgctgtcccgcagatgccactcggtgattggccgygtttgaagccgcgccccggcgtcgcgttgcagccttaggtccagccgagcgccgactcacgccccagccccaattgggcggccggtttccaattggaagggcttttgagcctcagtcttcgggcggcgctgaccattggcgggcaggatggaggcggagccttgggttgtcgcccccccccgggggttaaggtgagcgactgcaggcaaacccggcgacagcgcagctcgcgtcgaccctggctcctttgcctgccccgtcaggtgagcctgcgctagacccccgtccccttcctgcgcccgcccgaatgcgcctgcgcggcaacagccgcctgcccttgcgccccttccccatgcctcctgggcacatctccccactcccctccatgccctgccatcatcccgcccccaggctcttctgcggggtctccccagtccgggtccttcccccacccccccccaccccccaggannnnnnnnnnnnnnnnnnnnnnnnnnnnnnnnnnnnnnnnnnnnnnnnnnnnnnnnnnnnnnnnnnnnnnnnnnnnnnnnnnnnnnnnnnnnnnnnnnnnnnnnnnnnnnnnnnnnnnnnnnnnnnnnnnnnnnnnnnnnnnnnnnnnnnnnnnnnnnnnnnnnnnnnnnnnnnnnnnnnnnnnnnnnnnnnnnnnnnnnnnnnnnnnnnnnnnnnnnnnnnnnnnnnnnnnnnnnnnnnnnnnnnnnnnnnnnnnnnnnnnnnnnnnnnnnnnnnnnnnnnnnnnnnnnnnnnnnnnnnnnnnnnnnnnnnnnnnnnnnnnnnnnnnnnnnnnnnnnnnnnnnnnnnnnnnnnnnnnnnnnnnnnnnnnnnnnnnnnnnnnnnnnnnnnnnnnnnnnnnnnnnnnnnnnnnnnnnnnnnnnnnnnnnnnnnnnnnnnnnnnnnnnnnnnnnnnnnnnnnnnnnnnnnnnnnnnnnnnnnnnnnnnnnnnnnnnnnnnnnnnnnnnnnnnnnnnnnnnnnnnnnnnnnnnnnnnnnnnnnnnnnnnnnnnnnnnnnnnnnnnnnnnnnnnnnnnnnnnnnnnnnnnnnnnnnnnnnnnnnnnnnnnnnnnnnnnnnnnnnnnnnnnnnnnnnnnnnnnnnnnnnnnnnnnnnnnnnnnnnnnnnnnnnnnnnnnnnnnnnnnnnnnnnnnnnnnnnnnnnnnnnnnnnnnnnnnnnnnnnnnnnnnnnnnnnnnnnnnnnnnnnnnnnnnnnnnnnnnnnnnnnnnnnnnnnnnnnnnnnnnnnnnnnnnnnnnnnnnnnnnnnnnnnnnnnnnnnnnnnnnnnnnnnnnnnnnnnnnnnnnnnnnnnnnnnnnnnnnnnnnnnnnnnnnnnnnnnnnnnnnnnnnnnnnnnnnnnnnnnnnnnnnnnnnnnnnnnnnnnnnnnnnnnnnnnnnnnnnnnnnnnnnnnnnnnnnnnnnnnnnnnnnnnnnnnnnnnnnnnnnnnnnnnnnnnnnnnnnnnnnnnnnnnnnnnnnnnnnnnnnnnnnnnnnnnnnnnnnnnnnnnnnnnnnnnnnnnnnnnnnnnnnnnnnnnnnnnnnnnnnnnnnnnnnnnnnnnnnnnnnnnnnnnnnnnnnnnnnnnnnnnnnnnnnnnnnnnnnnnnnnnnnnnnnnnnnnnnnnnnnnnnnnnnnnnnnnnnnnnnnnnnnnnnnnnnnnnnnnnnnnnnnnnnnnnnnnnnnnnnnnnnnnnnnnnnnnnnnnnnnnnnnnnnnnnnnnnnnnnnnnnnnnnnnnnnnnnnnnnnnnnnnnnnnnnnnnnnnnnnnnnnnnnnnnnnnnnnnnnnnnnnnnnnnnnnnnnnnnnnnnnnnnnnnnnnnnnnnnnnnnnnnnnnnnnnnnnnnnnnnnnnnnnnnnnnnnnnnnnnnnnnnnnnnnnnnnnnnnnnnnnnnnnnnnnnnnnnnnnnnnnnnnnnnnnnnnnnnnnnnnnnnnnnnnnnnnnnnnnnnnnnnnnnnnnnnnnnnnnnnnnnnnnnnnnnnnnnnnnnnnnnnnnnnnnnnnnnnnnnnnnnnnnnnnnnnnnnnnnnnnnnnnnnnnnnnnnnnnnnnnnnnnnnnnnnnnnnnnnnnnnnnnnnnnnnnnnnnnnnnnnnnnnnnnnnnnnnnnnnnnnnnnnnnnnnnnnnnnnnnnnnnnnnnnnnnnnnnnnnnnnnnnnnnnnnnnnnnnnnnnnnnnnnnnnnnnnnnnnnnnnnnnnnnnnnnnnnnnnnnnnnnnnnnnnnnnnnnnnnnnnnnnnnnnnnnnnnnnnnnnnnnnnnnnnnnnnnnnnnnnnnnnnnnnnnnnnnnnnnnnnnnnnnnnnnnnnnnnnnnnnnnnnnnnnnnnnnnnnnnnnnnnnnnnnnnnnnnnnnnnnnnnnnnnnnnnnnnnnnnnnnnnnnnnnnnnnnnnnnnnnnnnnnnnnnnnnnnnnnnnnnnnnnnnnnnnnnnnnnnnnnnnnnnnnnnnnnnnnnnnnnnnnnnnnnnnnnnnnnnnnnnnnnnnnnnnnnnnnnnnnnnnnnnnnnnnnnnnnnnnnnnnnnnnnnnnnnnnnnnnnnnnnnnnnnnnnnnnnnnnnnnnnnnnnnnnnnnnnnnnnnnnnnnnnnnnnnnnnnnnnnnnnnnnnnnnnnnnnnnnnnnnnnnnnnnnnnnnnnnnnnnnnnnnnnnnnnnnnnnnnnnnnnnnnnnnnnnnnnnnnnnnnnnnnnnnnnnnnnnnnnnnnnnnnnnnnnnnnnnnnnnnnnnnnnnnnnnnnnnnnnnnnnnnnnnnnnnnnnnnnnnnnnnnnnnnnnnnnnnnnnnnnnnnnnnnnnnnnnnnnnnnnnnnnnnnnnnnnnnnnnnnnnnnnnnnnnnnnnnnnnnnnnnnnnnnnnnnnnnnnnnnnnnnnnnnnnnnnnnnnnnnnnnnnnnnnnnnnnnnnnnnnnnnnnnnnnnnnnnnnnnnnnnnnnnnnnnnnnnnnnnnnnnnnnnnnnnnnnnnnnnnnnnnnnnnnnnnnnnnnnnnnnnnnnnnnnnnnnnnnnnnnnnnnnnnnnnnnnnnnnnnnnnnnnnnnnnnnnnnnnnnnnnnnnnnnnnnnnnnnnnnnnnnnnnnnnnnnnnnnnnnnnnnnnnnnnnnnnnnnnnnnnnnnnnnnnnnnnnnnnnnnnnnnnnnnnnnnnnnnnnnnnnnnnnnnnnnnnnnnnnnnnnnnnnnnnnnnnnnnnnnnnnnnnnnnnnnnnnnnnnnnnnnnnnnnnnnnnnnnnnnnnnnnnnnnnnnnnnnnnnnnnnnnnnnnnnnnnnnnnnnnnnnnnnnnnnnnnnnnnnnnnnnnnnnnnnnnnnnnnnnnnnnnnnnnnnnnnnnnnnnnnnnnnnnnnnnnnnnnnnnnnnnnnnnnnnnnnnnnnnnnnnnnnnnnnnnnnnnnnnnnnnnnnnnnnnnnnnnnnnnnnnnnnnnnnnnnnnnnnnnnnnnnnnnnnnnnnnnnnnnnnnnnnnnnnnnnnnnnnnnnnnnnnnnnnnnnnnnnnnnnnnnnnnnnnnnnnnnnnnnnnnnnnnnnnnnnnnnnnnnnnnnnnnnnnnnnnnnnnnnnnnnnnnnnnnnnnnnnnnnnnnnnnnnnnnnnnnnnnnnnnnnnnnnnnnnnnnnnnnnnnnnnnnnnnnnnnnnnnnnnnnnnnnnnnnnnnnnnnnnnnnnnnnnnnnnnnnnnnnnnnnnnnnnnnnnnnnnnnnnnnnnnnnnnnnnnnnnnnnnnnnnnnnnnnnnnnnnnnnnnnnnnnnnnnnnnnnnnnnnnnnnnnnnnnnnnnnnnnnnnnnnnnnnnnnnnnnnnnnnnnnnnnnnnnnnnnnnnnnnnnnnnnnnnnnnnnnnnnnnnnnnnnnnnnnnnnnnnnnnnnnnnnnnnnnnnnnnnnnnnnnnnnnnnnnnnnnnnnnnnnnnnnnnnnnnnnnnnnnnnnnnnnnnnnnnnnnnnnnnnnnnnnnnnnnnnnnnnnnnnnnnnnnnnnnnnnnnnnnnnnnnnnnnnnnnnnnnnnnnnnnnnnnnnnnnnnnnnnnnnnnnnnnnnnnnnnnnnnnnnnnnnnnnnnnnnnnnnnnnnnnnnnnnnnnnnnnnnnnnnnnnnnnnnnnnnnnnnnnnnnnnnnnnnnnnnnnnnnnnnnnnnnnnnnnnnnnnnnnnnnnnnnnnnnnnnnnnnnnnnnnnnnnnnnnnnnnnnnnnnnnnnnnnnnnnnnnnnnnnnnnnnnnnnnnnnnnnnnnnnnnnnnnnnnnnnnnnnnnnnnnnnnnnnnnnnnnnnnnnnnnnnnnnnnnnnnnnnnnnagagtgttcagcagtggactgaccacttagaaaatagatcctcactcaccagcctctcgcggtgcttaacacgctaactattttggtgtctgtttctgcccatcagttctttttctggtcagaatctgaatgtccgatgcaattggtataatgcaaaccaactgcaaaggtattttgaaagagaatgatttgaattccaaagatttaaaagaggcccttggaaaaaattcatgaaggcttcgatatatttacagaaatggccctctgcaaaagtcagaggggacgtaaggatgtctattatgccatcctgcagccatgcagagtgcctacactccccaaaacagcacctgataatgttactttgaggactgatgcagagtgcaagtataacctcaattttgaaagtattatttttaattgacacataattataacctcagcttttaaagacgaaacttcaaaataaggtcctattcaacctttgtgccacaaaaaactgaaattttggtccattttctttatagattcactttgagaggcctttttcaggcatagttactctcaacaagaacctcctataaattatattgtcacaagaagtctcttatttttgccataattgccccatcatggcataattgcaggtatttcagctgccaacacaccaggccaaactgccttgttggagtgctgtgtttctagaccctttggtttgtctgcagagatctatctttagtggcctcttccacaatattttgtatgagcactggtctgttttctcagcccccactgtgggatgcagctgcctcctatgcccctccttcccttaggatgcggaagggagagctgtttgactatctcacagagaaggtggccctctctgaaaaggaaaccaggtaagggttgagyctgaagccccaggggtgagcagggggtgggacagggcagggaggagccgaggaggagactgcacccgcctccccttcccccaggtccatcatgcggtctctgctggaagcagtgagctttctcyatgccaacaacattgtgcatcgagatctgaagcccgagaatattctcctagatgacaatatgcagatccgactttcagatttcgggttctcctgccacttggaacctggcgagaagcttcraggtgaggggatctagtgccctaataggcttgggaggggagacccaggcctgatgagattggttggctgggtctgagtaccaagtccctggtgccaagaaaaagggagaagtcattgggcacttgccaagtatcctgtgggcgcaaagcctatgtttacctcagagtgggcatcctgacctgggaggatggagacagacaagcaggcagacagacagtggtgcacagtgggcagagggccaggccaggggaacccggaggaaggaacgccaattcagcctgagccccatagaggaggtaaaaaagggagccacatgttcagccacgtttggggtctggagtgcaggaccacaagagcctgatgtgatgtgtccagactgcacttcccacctgggccctgggcctcaggttcacctgatgtgaatacagttgttgtgacaggaatgtttctactgcaaatgggaaacttcaaataaaattcacctgtgggattcttcagagcctttagtctgccactgactctctccctcaatggtttgtactagacttatgaaaagctaccgtttactgggcattcacctgtgaggcaggcaccagtctttttttttcttttttctttttttttttttgagacagagtctcactctgtcacccaggctgggatgcagtggcatgatcttcactcaccgaaatctccacctcctgggttcaagctattcttctgcctcagcctcccaagtagttgggattacaggtgcccaccactacgcctggctcatttttgtatttttagtagagatggaatttcacaatgttggccaggctggtcttgaactcctgacctcaagtgatcctcctgtcccagcctccagaagtgctgggattacaggtgtgagcactgtgccttgtcggcaccagtctttatatggcttattcccctaaatcctctccacagccctgtgtgacagacagtatttgtgtctctttttttatagattggctcaaagaggtgagatgactgctctagggtcctaatgctaggatttgaacttggacagtctgactccagagttaatactcttaacctgtggacccacatgtctggtggatgttgtactttaaaaccctttggcttccacatgtacttttcccgtttgtggaatcatctttgcctctgcccactgcatcctctccttggcttgggtaattcaggcttcactttaaacctccagggcagcttargtccccttgctttctgttctcccatcttcttcattcacaacacgtcttactgtattgttatttctcacttgccttcaggtagacagtgagctcggtaagggctcatctcatttgccacttggcaaatcaatgcaacttggcattcaagaaatacttggtgtaggaatgaatttcccaacaaagtcagtttcaattcggggctgttaaaatctcctggaagtgtgccatggaacaaggttcagaaagtactggaagaattggtgcccgagtggtagaacaaactaaaaatacagacttgagccaagcgtggtggcacgcatctgtcaccccagctactcgggaggctgaaggaggaggctcacttgagcctaggagcccaaggctacaatgagctgtgatagtgccaccacactccagcctgtgtgacatagcgaccctgtctctaaaaataaataaatataaaaatacagacttggataaagttttggagggctctggactttagaactgtagatttgatcatgtgtcatgatgtggaatcagggaagggttttaaacaaaggacttacccattatgtgctttaagaaatcccatagctcgccgggcgcggtagctcacgcctgtaatcccagcactttgggagcccgaggtgggcggatcacgagtcaggagttcaagaccagcctggccaacacggtgaaagcctgtctctactaaagattcaaaaaattagccaggcgtggtggcacgtgcctgtaatcccagctactcgggagactgaggcaggagaatcgcttgaacccaggaggcggaggttacattgagccgagatcatgccattgtacaccagactaggcgacagggcaagactccatctccaaaaaaaaaagaaaagaaattccttatctccacttcttccccttgggttgagtgatagttggagattataggaggaggaagaggtttgggcagataggaatgcagaaaatttttttttgcgtatgtattatgatgtatgtaaaaatacataatctttccatatgcattatgatatatataaaactaaggtaacaagttgtgaggagtgggtaggttggcttggatagtgggtaggtagggttggaggaggcaaatgatatggtggaacaaggaccttgaaatcaatccaaaacccaggttttcctaggaaggccaccaggagccatggtgagccaactgttgcgcagggatagtgcctcagcaggagacttggcagaaggcagacagaaggaagatgggaacactggtagtcctggcagcgttgaggaggctccagcagagatccagtgctaagggccctagaggggctggtggcatcccctcaatcttggtcctctctccccagagttgtgtgrgaccccagggtatctagcgccagagatccttaaatgctccatggatgaaacccacccaggctatggcaaggaggtcgacctgtgagttcctggtctccccctccctcccgtgcttgctgtcctttgctgggtctgcccgtcacctagtcccgcctgactccagtctctttcccagctgggcctgtggggtgatcttgttcacactcctggctggctcgccacccttctggcaccggcggcagatcctgatgttacgcatgatcatggrgggccagtaccagttcagttcccccgagtgggatgaccgttccagcactgtcaaagacctggtgagcgggggctgagaggacagtaggggaggcccaagagctgcccctcatgctctgggtctctcctagatctccaggctgctgcaggtggatcctgaggcacgcctgacagctgagcaggccctacagcaccccttctttgagcgttgtgaaggcagccaaccctggaacctcaccccccgccagcggttccgggtaagcctgagtgtatcagggtctgggcccgtttctctgtcccatgatctttcccctgcactagagctcaccctgccccccttcccaggtggcagtgtggacagtgctggctgctggacgagtggccctaagcacccatcgtgtacggccactgaccaagaatgcactgttgagggacccttatgcgctgcggtcagtgcggcacctcatcgacaactgtgccttccggctctacgggcactgggtaaagaaaggggagcagcagaaccgggcggctctctttcagcaccggcccccygggccttttcccatcatgggccctgaagaggagggagactctgctgctataactgaggatgaggccgtgcttgtgctgggctaggacctcaaccccagrgattcccaggaagcagaactctccagaagaagggttttgatcattccagctcctctgggctctggcctcaggcccactaatgatcctgctaccctcttgaagaccagcccggtacctctctccccactggccaggactctgagatcagagctggggtggaagggagccattytgaacgccacgcctggcccggtcagtgctgcatgcactgcatatgaaataaaatctgctacacgccagggagaacaggtgtcctgtgtctgtctggcttgggcaggaaagcccagaaggtgctcagcagggtgcagggatggtgccattctggcccagacctttattggggaaaatgttgggggtcacttggtcttgctcttgcctttacccggaggtagctggaagggccgctctagtgcagtcaacttgctgctgagcctttcctcgctggccttgagccgctcctccaccagcccctggagctgctccagctctttgttcacttgggtcttgatgtaggctcggaggacgtggatgtggcctgcaggggcagggaagaaggggcagggtgaggagagatgctgtctggcaatggggggatggtccctagttgggcaaacagtccccaaatttcccctggtggggatatagaggtagcaatgttgtttccctttaggaaatgttagcaagcccttgtgtgagaggtagttgggtagggtggctatgctggactttgcagcttcaaattctgatccctactcagtagctgtgtgaccttaggcaggttatttaacctatctgtgcctcagtttccttgtatgaaatgtggatagtgatacctagcacataggattgagggaggattaaatgagttaatttatgtaaaatgcttagagcagggcatgcactgcacacctattgccaagtatgtgctggctgttattgtcattggctttctctttttttttttttttttgagatggagtcttgctttatcccccaggctggagtgcagtggcagcgatctcagctcactgcaagctctgcctcccaggttcatgccattctcctgcctcagcctcccagtagctgggactacaggcacccgccaccacgcccggctaactttttgtatttttagtagagacggggtttcacagtgttagccaggatggactcgatctcctgacctcgtgatccgcctgcctcagcctcccaaagtgctgggattacagttgtgagccactgcacctggcctgttctttgtttttttttaactcttaagttctgggatacgagcagaacatgcaggtttgctacgtaggtatacatgggccatggtggtttgctttacccatcaacccatcatataggttttaagccaccgtcattggctttctaatgatcatttctctggagccacttcagctgtgctttttgtttgtttgtttgtttgttttgagacagagtcttgctctgttgcccaggctggagtgcagtggccagatcttggctcactgcagtctccacctcctgggttcatgcagttctcctgcctcagcctcctgagtagctgggactacaagcgcgcaccaccatgcctggctattttttgtattttagtagatagggggtttcacggtgttgcccaggctggtcgcgaactcctgagctcaggcaatccgcctgcctcagattgtgctgggattacaggggtgagccaccacgcctggcctgcagctgtgcttttatctgtcatcttggacttctgcataagggatcatttagagaaaggactctgactaaaaacaaaaagtctgaagtcctgatgtgatccaaacccttcattctacacctgctcagagggacagggcagcctgccctctccagatcctcacttggctctggctctggtggggccactgtctctagttcctctttctgcggggtaactgcctgctcctccatctccttgctttcttctttctctgcaaaccagaagcaggaagagactgtggccccaggcctggcccagcccagccctgccctggcactctcccttacccgtctcactctctggccacagtttgggtggctgtagccccatgtaagtcaaagacagatccagccgcacctgggaagcaaggcagagggaggctgaaaggagtgcacctgtgctgaggggaggggcggttgagggtggctcctcatggtccaccaccccctacctggggtgtgaagacgtatttatagagcttgaagtggcggaagtaagtgttgaccacgtagtcttccaaggccagcagctgttcctctttgaagaggtcgatgctgaaaggaggccgctgtggtggtgactcggaattagaaccctgactaccttccggagccctggctttgcctccaaaagcccagcaacaggagcaaggagagcccactggggtcttcacaagaagataagggtgatgaatgtgagagagactgggtgagaccttgtctggggatgggtaaagtttccagaatgttccaggggaactgaccctgactccatggcaaaaaaggacactggtgaagtagcggtagcactcctccacgttgcccaagggggttgctggtagggaaagcaagatgcagcagtgaggccctctctggtatccattcattcacttcactcaacagctgtttatgaccatgagcttcagaagcagacagatctgggtttcagcactggcttgtttccttaactcatgtaacaaatactgaatacccactatatgcccactgtatggttttcggcactgaacaagacagacaaggtcctgcccttacgaagcttatattctaggggaataaaccaagaaatagatcatttcagctattaaacattctgaagcaagagctattaaacattctaaagcaggtgttattgtgcactatgcatatatttgcatatattatttctcagaacagtcctgtaaaatgtgtgctgtatccttaatttctagataaggaagcagtggattggaaagctgatggcttgtgtatgatgatgctactaataatgacatattccaggcagaaatcccctgcttctgcttcccatggtcacttgtgccaggcccggttcctcttctccctggggctcaaacctggtagctgccccctctcaccaatacaagccttgtgaagatcctggagcagggcacaagccgctgacgtctgctccagtgagaagccctgctggcggcagaaaatgagcgcgtggcagaagaggtccagggtgatggcgtccctcaggctctgctcaggacaccctagctccagcagctcagccagcacccttgggagggagagaggagtgagtgacaactgggcctcctttcatcaccctacacccaccacatgctttggagtcagccattcctcatgttttcccaacctgacccctcagcctttgccaagagctcttcccacgcccccctcagtccctactccctcatctcagcattggtggtcttctccagctggtgcatggaatggacgtccaggtacttcctgttatagtaaaagaaaaagagtattggtggccgttacctatcatgacagggctgtgacagctagtgcgtgagactgggagttggccaccggcgtgaagctgggctcttttgccagcttgctgtgtgactatgcaaatcgttaactctctgggcctaaatgaactcttatgagcctctccatttctaaagcctagggttaggaatcttgaattcttttttctgctctgccactaccttgtatgaccttggtcaagtactccctgtggccctcagtgtccccctctgtacaatactccttagcggccatgagactccatttacattctgtctttggctctttttttctcacactgcctcctctttggactggagaggctggaaagccaacttccagtcacctggagtaattgcatctccaggcctcagtctcatctgtaaaatggggatgccctggccacagacaggactgttggggagacaataaagaacgcaaatattcagtgtaatttttgtctcttcacactcaccacatgcagatccggggtcggggcagcggcggctgcggaaagaaagcgaattggggaaggcagctgcggtgtcctggcccgtagcgaatctccagcaggccggagaagccgctgtaacttgccatctcatctcaaggactaaggagaggcgcgggcgagggagggcttcagcaggccctaggtgctctacgcgagcacagtaaccaccggggtcacacacccctgcctctcctcgcccaagcagcccgggagacgtcccgaacgttagtaagcataatgacaggtggcgcctgcgggggagccggtttataaatattcacgagcagaccagactgtcccgccctcaccggaaacaagttggctccggggtcttcatccgctttcgccgccgccgccgtcgtccactgagtccgcacactcgcacgcgtccgcgcggccgacccatgcactgagctgcgatccttccccgcttcccgccgcagctcggagagatgttcaagctccgactgcaccctcattcccaaaaagtggctggtcttgcggttgagcatctcgccgctcttccgtgccgcgaggcgccccgggctcccgccgcctaggttccaggacagccagcgctcggtcggcggctaccaaggccgggcccgttcgcctcgctccggccaatctacgcgcggagaggcgcggcggggcgaatccgtgggggcgtctccctccgtctcaacggcgacggttgccaagggggcttgtgagggaaggaaggcggaaagcgcaggctcacgccagtgggagcgaagagaacgcgcagatacgtgagaagttgcgagtgcccacctgggcgccctctcttccaggttgctaatacgagggccggtgctgtcctccaggctgggaagtgggagcgcggtgtcagttactatgggaactgcctcttggccaatcaccgagagaaagaggaggtgtttgggaagaagccagaggacccgagtggcgggaccaagcgtaaccaatagaagcagaagataaagaagtttcctcacatccggggctgcctttggcgcctgcgccctgcgcaccgttggggggggggcagtggcgtccagtgacgcccagtgacgtccggtgaaatccaagatggcggcgctaggctgaccctcctgctggtgagggctctggcgccgggggggacgggatccagcaggtgtgtgcagggtggagggtgtttggggctgtggaacaccagccgttcccacatctctgctctgtgtcttctgcaggtgacggaagtaccgcctcctcccgtctgacgcccctcaggggaccctgcatcgctccagccgccgcggccatgtctgggccaggcaacaaacgcgccgccggcgacgggggctcagggcccccggaaaagaagctgagtcgtgaggagaagaccaccacgactcttatcgagcccattcgtcttggaggcatctcttccacggttcgtgggctcttgccttaaccctcagaacttcccagagccctccctctgttctctggccaaactgtgcggaatcttacacccacttccccaagtttagcaaggtccgcgttacaggaccttgaaagaaaggttagaaagaagctcagaacacgacgcctgtcttccctttacagataggaaaacaggtttccagggggcgtgtgacttgtcaaagactaaggatttacaaggggacaggcagaaacaacgtgagcctcctcacaacaaagacactttcgctgtgtgttgtctgagcctccttagattctgttagcggttagtgtgggaatacctccatctcccatgcattgcagatgctctgctcctctttctctctctgtgattggtttgtgggccctgcttgacgctctcgtcggcccctttgtttcctttggtaggaggagatggacctgaaggtactacagttcaagaacaagaaactggcagagcggctggaacaacggcaggcttgtgaagatgaactccgagaacgaattgagaagttggagaagcggcaggccacagatgatgccacactcctcatcgtcaatcgctactgggcccaggtggataccttctgctttcaaagaccaggccttgattcagctgccaatccccagattcccctgctaggaaaggag

SEQ ID NO: 97654 - DNA, 17840 bp, Homo sapiens
  misc_feature (1)...(17840): n = A,T,C or G
ataacttgaatgagcaatcaggatgggagaggtctagtttgaggaaagattttcaaaaggagatttgcagtcccctgaaataagataatccttttgtttgtttttgttttttgagaccatctggctctgtcacccagactggagtgcagtggcaagatctcggcttactgcaacttatgcctcctgggttcaagtgatcctccccacctcagcctcctgagtagctgggcctacaggcgtgtgccaccacgcctggctaatttttttgtaattttttttttttttttttttttttgaggtgaagtcttgctctgtcgcccaggctggagtgcagtggtgctatctcggatcactgcaagctccacctcccgggttcacgccattctcctgcctcagcctcccaagtagctgggactacaggcgcccgccaccacgcctggctaattttttgtatttttagtagagacggggtttcactgtgttagccaggatggtcttgatctcctgacctcatgatccgcctgcctcggcctcccaaagtgctgggattacaggtgttagccaccgcacccggcctgtaattcttatagaaacagggtttcatcatgttgtccaggccgatctcgaactccttgtctcaagtgatctgcccacctctgccttccaaagtgttgggattataggcgtgagccaccacacctggccaaaagaatcttttcttttggagttctttcacccctctctttcatagttcccttcttcccaccatgccccctccacaacagccctgaaaggggagaatagagaagcaactaagattcttcccgtattctagatgaggcactggaggcccagagggattgactgctgcaggtcacccagtcaggccagagcactcagccattgtccactcttaccagaattggactgagttggagagctatgggtggggggtaaggtgggcattgggaatggtgcatcctgggaggtgagaaagtgctggctggtccatttcctcctgctggaattcagttcagttcagccctttatcaggagctcaggaaggtgggcctttttttttttttttttttttttttttagtttttaaattttttttttaacttttaagttcatgggtatatgtgcaggtttgttaaatgggtaaacttgtgtcatgggggtttgttgtaccgattatttcatcacccaggtattaagtctatttaccattagttatttctcctgatcctctccctcctccctctgaaaggctccagggtgtgttgttcccatggatgtgtccatgtgttctcatcatttagctcccatttctaagtgagaacatgcaatttctgttcctgcattagtttgctaaggataatggcctccagctccttccatgttcctgtaaaggacatgatcttgttcttttttatggctgcatagtattccatggtgtatatgtaccacattttctttattcattctttcattgatgggcattgaggttgattccatggcttttactattgtgaacagtgccatacaccttcaaactcttgcccagcttaaatgccaccacctcagtgaaatcctcactgatgcctactcctccctgcccaagccagaagtgacttctctttcctctgctttcctctatgggcctttcctccttgtgcctttagctgtggcccaaggttgagggcatctgtaaaggtatcccctctccaggcgcttggctcctcaaagacaggaggaggggttaaaatttagggcttgcaaagtcaagtgcccatagagttggcctgggaggtaacagaagtgatgcattggtgtaggacattagggagtggcacctagccacccagctcccctcagtcatcatctggtgggaaggagtgcctagtgaggccacatcttacgattcttcaaggaaaagctcagtatgtaaatttatttataaaaatgtcctttttgtagtgttagtcattaaggaagtttttagcattctgtagactccataaaacatgtttggagggcagcctcatggtttgtgccatctgatctattaatagtttatcttagggataggctggtgcctgggaggcagacaacactgtggtaagagttcagattcagcatcaccaggcctgggtttcctggctgtaaacaggaatgatgatcagagatcttgtctcccaaggctgtggttcttaaagtgtggtcgggggaccagcagcatccacaaaactggagaacttgttaaaaaagtaaactctgggccgggcatggtggctcacacctgtaatcctagcactttgggaggccgaggtgggcagatcacttgaggtcaggagtttgagaccagcctggccaacatggtgaaaccccatctctactaaaaaaatacaaaaaattagccaggcgtggtggcaaatgcttttaatcccaactacttgggaggctgtggcaaggagattgcttgaacctgggaggtggaagttgcagtgagccgagattgcaccactgtactccatcctgggttacagagtgagactccatctcaaaaaaaaaaaaaaaaaagtaaactctggtcaggtgcggtggctcaggcctgtaatcccagcactttgggaggccaaagtgggaggatcaaggctacagtgagctacagggaggttgaggctgcagtaagctgtgattgtaccactgcactccagcctgggtgacagagcaagactccgtctcggggaaaaaaaaaaaaaaaaaaaaaaaggaaaacgtatgtatgtcagaaaaatgcatataatatgtcaaatggtgagaaaaagaggaaaaaatgatgcaaggaagtggtaggagtgtggagaattacattagtttttgcattgctataaagaaataccttcggctgggtaatttataaagaaaagaggttgaattggctcaggattctgcaagctgtacaggaagtatcgtgcctgcgtctgctcagcttctggggaagcctcacgtagcttttactcttgatggaacgtgaaggaatcggcatgtcacatggcaagacagcaagagagaggaggggaggtcacagactcttttatttatttatttatttattttgagatggagtctcgctctgttgcccaggctggggtgcagtggcacaatcgtggctcactgcaacctccacctctcgggttcaagtgattctcctgcctcagcctcctgagtagccgggattacaggcgcctgccaccatacccggctaatttttgtatgttgagtagagacaaggttttgccatgttaggccaggctagtctcgaactcctgacctcaagtgagccgcctgcctcggcttcccaaagtgctaggattacaggcatgagccaccacgcctggcagaatattgtagtctcaaatacaataatcatggaaggcctccgaggaggtgatgtgaggagtggacagatgaggtcaggccatgagggtgtttttgagaagagcaagccacagagtgcaccaggtcactcacttatgtgggaagcaggtggagggcagatggtctggatacctgggcgcagggatgggagtggccaggagtgctgacctctcatctggctgcccagggcaaacagagagccgtggtcggctgcagggggtggcagaactgcgtctggcaggtttggagctgacagatgcctccctgcgtctcctgctgcgtcacgcaccccagctgagcgccctggacctgagccactgcgcccacgtcggggaccccagtgttcacctcctcacggcccccacgtccccactccgcgagaccctggtgcacctcaatcttgctggtaagcacggtcccccatccgtcctgccagcctgtggatccccacggccagtgccaaccccttgctcacctgcctggtctcagctccactgccccatccccaggttgccaccgcctaacggaccactgcctcccgctgttccgccgctgccctcgtctacgccgcctagacctgcgctcctgccgccagctctcacccgaagcttgtgcccggctggcagctgccgggccccctggccccttccgctgccctgaggagaagctgcttctcaaggacagctagttgggcgccccccaccctcccccggactcgacaggagcctggacctccggcttcatttcacccctgctgggaggccaggttcccacctcaccaccctgggattcctgagtgtcagtgacttgggattcccacccagggactcaagccagccacccccttctttcccccctgcactgatatctctgggggtttctccttcctatgtcctgcccctgctacctgcttcattgtccatcccctgggggagtgggtcagaggtactggagggtgctgagccgaagggacggtgggaggggggttatggtgcaagtgttgggggggagaatggggaaaggacacacacaggatatgggagccaggggctgggggaggtggaaggggcggggggcggggcagacagcagaccaccaagggttcagggaacaaagaccagttacttggagtggggggtgggggtggggccacaaaaggaaaaccggaggagcaattggggatccaggtgtcagaggtaggggaaccaggggcaagctggggctgagctggaggtggggatgagagcaggtgtggggacagcaatacccccttgggggtcacctctctgcttcccccctccccaggcttcagttccttccccctgaccctgactccttgaacgtcactgaaaacggcagctattgcaaggagtgggggccgcgggcagccgctcttcagctcgcggcccaggggagtggcgaggggcgccccaaccccctgcccgcctctccgcacaatacttgaacattcatctgtactgaagtgttacttgaaccgggggaatctcggacctgggggagccggggtgtgaggggactggaccagcttggactgagacctgagaccgggccggtgggcgcccatttgggactgcgccacccccaggcttgttcttgttttactgtattgagcggcggcacccgccggacccgcattatggctgggggcgccagcccaagaatggggaccatgggactcctccagcctggctcttcccactctttcatcgtcatggaaacttgtatcccatttgcccagggaactgccactcctggttgccatggaaatagcagccaacggacacctcccgatgccagtgctaaggctggaaatggccccctcttagttgccatgggaacctagtaacagactctgctggccctccttccctgccccttcctcgagcgcggggtggggcttcgggaccccggggatgagccgggccaggtcccgcccctccgcgcaggcctccggggggccggggcttaccatgtaggggaggggagatctatccacatacctcaggtaacagggaggtgcgcgggtggggggagggctgggcggaccaaaggccggaggggtggggcctggggatagcgagaggcttgagaatggggccgcttgggggagggaagaggcagcccggcgaggggcaagcgggggacccagccgggctgggcccctgggccccgggtctgtacaatacggtttgctataaaactcaaaatcttccagccggggctgcggagttcgtgtgtgtatctgcggggtccctacctacagatgagtgggctcacctctcctggactcattttgggagggatttggaagtgtggacacctggggtgtccagctgtaccttggagggggctggggttggcgtgcacctcggtggggtccgggcgcttggataacgttcttggtgggtaggggtcgcggggaatctctgcgggcccgggactgcggggacttggtccccggctccaccccatcatgtggctagccccggctccgcctctgtcccagttcctgttttggcctccgctgtcccgctccggctcctggggctccccgcagacgctgcttttcttgctccactgggggtgcctcttcctgggcgcccgccgcctgcatcctgctcgccctgtctgggaatggggccgcccccgggcttgggccggcccggctggggcccccgaggcgcttccgccccgtagtgaccgcctggtgccgccccccccccaggatgaagggcggcgagggggacgcgggcgagcaggccccgctgaaccctgagggcgagagccctgcaggctcggccacgtaccgggagttcgtgcaccgcggctacctggacctcatgggggccagtcagcactcgctgcgggcgctcagctggcgccgcctctacctcagccgggccaagctcaaagcttccagccgcacgtctgccttgctctcgggcttcgccatggtgaggggccgggaggggtcacacccggtggggcagagcaagtggggggcacaggtcggggggggggcgaagtaaacaggtcccaagggagacaggttaaagggggctttcgtcaaagggggaaggaacaaggtcccgcgggactgagcaagtcccttcttacggatgtgtgtgtacaggggaccccaggagacggggccaccggaggacacgaaagtcctaaaggtgtcgtagtgggagtggggtgaacaaatcgctggtggggttgactgcaacagtgaggcagagtggtccagatggagcctgtacctggcagaagtggttcctaagtcccagtgccagcttcaaaggcaggtcagctgggtgggggctgcatcaacaggtggggggctcgagatggattagctgggtggaagggtcacccagctgaaggtgggcccgtcccagggaaggtggccactctccagcgggcccaaggggtgctagtgtcaaccaggaaaactgacaagagatcatgcccgggagggaaccgctggggaaggaggctgatgaggaaactgataagcgagtctcaagctgataaaccccaggtgcaggaggacggtgttggctaacggtctgccccagcagtggcctcacaggaagtgggatggagggaggtcccagggtgaggatcagcagacacagtcctggctcctccctgcttgtggccagctgtgtgaccctggacaggcctccaccccgcttgcaagccagtgggaaactgagatcatggagggtgcgccctctgtagccagccaagtaaccgccccagggtgagccaggcatgtcagagcaggtcacgtaccaaggatggctcagactagcctgctaattggacaggtgtggaaagtaaaagccttgcctctgggcaggagcgaatgaactgggacccagggttgctgctctgttagtctggggttgccccaccatcaccccaggaaaaaggagaaagtgagctgcaggaggtactttggggaacgcactcctgtgggggtggatatcagaggcggttggggtggggaccatggcgctaggggatctgggctagtccctgccctgtctgtgccacaacctccatatttgaacaatgacagggaaactctctaaccctaagggtcatcataagcctatggtcttctatgtggggtcccagaatccacagaccagcttacctttcatgatgggggcatcacctagggacaggatgttggctccccttcatctgcacagcctgcagagggaagggagcagccacccaagctgagggaggtcaaccccatggtccagcctgttcccaaggagacaatccctccacggcagaatatgcaggtgcaggttgctggggtgacagcttaagggcccgagccttctctgcaggaggaaggggctggaggtttaggttccgggggcaggactggccgcagtcctagcaggggtgaccgaggctgggccaggctctgggagaaaccaggactaagcctggcccagatccctgtctgtggaaaacacctcctgacacctgccatggcccaatttcccaaaatactcagccctgttttcctacctccacccgccagcctctacacctaccttcttctttccccaggcccagagcaatcgaatggaccctacaagaaccagggatggggagagagtgggcttctgaaactcaggtggcctaagttagaatagcattatacaaattgtatccagctgtcactaagcaccaggcactgccctcagtgcctttatatacatcatctgttagcctacaaagtgggtactgctactctggccattttacagatgaggaaactgaggatcagagatgttaagacacctgcccaaggtcccacagcaagtaagtggcaggatttgagcctaagccgtctggttccagactccaaatttataaattcctagaatagggtcatcaactcaaatgtttgcaaagggccaggcaggtaatatggatgccaaattggctgggtagggactagcaagcaagagaccccatgacattgggggtgatggctcacacctttcatcccagcactttgggaggccaaggcaggaggatcgcttgagcctaggagcccaggagttcgagtccagccagcctgggcaacatagcaagacctggcatctaccaaaaaaaaaaaaagagagaccccatgacctttccaaggggagcagccatgactgatttgagctgatagttgccatgcaggaacgcaggccaagtgtggctagttcttccaagttttcaaggggatctggaaatagggatataagaaatctcttcagttttacaagttggcagcatcttccattttttaagaaacacactgtgtgagccaagcaaaacacgtctgcaagctggcagtggtccacagtgtgccgatttgtaaactctgtcctcagactttagcattcactatagcaagaacagcaaacacatacctagtgcttactctgtgcctggcactgttctttttctttttcttccttttccttttcctttcctttcctctttctttttctttctttcttttctttcttatctttcttttttttttttttgagacagagtcccacactgtcacccaggctggagtgcagtggtgcgatctcggctcactgcaacctctgcctcctgggttcaagcaattctcctgccttagcctcccaagctcctgagtagccgggattacaggcgcacaccaccacgcccggctaatttttatatttttagtagagacagggtttcaccatgttggccaggctggtcttgaactcctgacctcaggtgatccgcccaactcggcctcccaaagtgttgggatgaaaggcgtgagccaccactcccagcccatttcatgtatatttcatttaatgtttataccaaccctataaggcagggaggtgctgttatcaatctctatttccagataggaaattgaggcacacagagaactgacttgctcaagattacacagctagagcagagaatgatcccaggcagcccagctccagaatctgctgtttgatccctatgcagtaaacctgttagaagcatgtcatccagcccytttttttatttttatttttaatttttttttgagacagagtcttgctctgttgcccaggctggagtgcagtcacatgatctcggctcactcaaacttctgcctcctgggttcaagcagttctcctgcctcagcctctcaagtagcagggattacaggcatgtgccacgatgcccggctaatttttgtacttttagtagagacggggtttcgccatgttggccaggttggtctcaaactcctgacctcaggtgatccacacactttggcctcccaaagtgctgggattataggcatgaaccgccgcgcccggccatccagccctcttgatagggaggtggggaaaccagaacagaacagagcctttgcaaagctgtccattcgtttactcaacagagactgaatgtctctggtttctgccaggcacrgttctaggtcctagggatatgtatcagtgatgtatcccgataggcggaaaaaatctctacagttgaggttatggggagatcagtacatcccctcttgtccctgcaggtggccatggtggaggtgcagctggagagtgaccacgagtacccaccaggcctgctggtggccttcagtgcctgcaccaccgtgctggtggctgtgcacctctttgcactcatggtctccacgtgtctgctgccccacattgaagctgtgagcaacatccacaacctcaactctgtccaccagtcgccacaccagagactgcaccgctacgtggagctggcctggggcttctccactgccctgggcacctttctcttccttgctgaagttgtcctggttggttgggtsaagtttgtgcccattggggctcccttggacacaccgacccccatggtgcccacatcccgggtgcccgggactctggcaccagtggctacctcccttagtccagcttccaatctcccacggtcctctgcgtctgcagcaccgtcccaggctgagccagcctgcccaccccggcaagcctgtggtggtggtggggcccatgggccaggctggcaagcagccatggcctccacagccatcatggtacccgtggggctcgtgtttgtggcctttgccctgcatttctaccgctccttggtggcacacaagacagaccgctacaagcaggaactagaggaactgaatcgcctgcagggggagctgcaggctgtgtgagactggtgttagccaccgctcactgcaagcactgcctccctccggggtctgtaagaggccgcaggggcctacagacctcatccccccatcccctggctggagccacttccagtggccactctcaggcagagttcagattcctrcccgcagggtcctctgggctgggccttggggcagctcccacattcccagggattttccccatcagtctgtcccttgggttttgcaagctactctgcacctgggctggcctcagttgaaggatcatgcagtagatagaggggaggcagggagagcttgtgggaccttcagtgctgactttagccaccatttccattcctatacaggatgtgaaggtcagaaggcagccaattgttggtttaatttttttttttttttgagacagtctgtttcccaggctggagtgtagtgatacagtcacagctcactgtagcctcgaccttccaggctcaaaagatgctcccaccacagcctcccaggtagtgagtagctggtactacaggtgtgtgctgccacacccgactaatttttttgtagagacggggtttcgctgttcccaggctggtctcaaactcctgggctcaagtgaacctcccgcctcggcctcccaaagtgctgggattcctttctttatttctgtagaatctattttatggttggcattttgggggaagatttcgatgggttccacattcttgctttagttgttgtagagggatttgggtgtttctacccaaggcattggtctagcttttcctacaatgaacctatctttggaggttcaagctccccaccttcccccactgtggtgacctgtggccacttgcagaagggatggtgcctgacccactgccctagccccacgctatgcaccaaacttgttctccccgtcctggtccagggctggggtctttagagactgacagcctctgccccaggcctgagtccttagcaagggttgggtaaggaggttttaagggagaaggtccagtccttagcccttgaaatacaaagctcttctgacactgaatttggatgcaccttgttttatataataaatcgtgtttcacagatgtccctgttgctgtgaaggggatgcagggcaggccttcttaggataactttacttgttcccaagagccgggtggtggcaagtttgggtggacaggacctgggaggggagtgggtttcaggtgtaaccctgtcagatgctaacaagggccaacagcttctgaatggggagagttattccaaggctacaggctttgaactcttgtccctgagttcagagtctctatctcttccactgagtatttatttatttagagacggagtcttgtgttgcccaggctggagtgcagtggtgcgatctcagctcactgtaacctccgtctcccaagttcaagcaattctcctgcctcagccaccagagtagctgggattacaagtgtgtgccgccacacccggctaatttttatatttttattagagacggggtttcgccatgttggccaagctggtctcaaacttctgacctcaggtgatccacctgtctggcctcccgaagtgctgggattacaggcatgagccaccacacccagccctccctgagtgtttagtataagcactctttttttttttttttttttgagaccgagtctcgctctgtcttgcactgtcgcccaggctggagtacagtggcatgatctcggctcactgcaagcgccgcctcctgggttcacgccattctcctgcctcagcctcccaagtagctgggattacaggtgcccaccaccacgctcggctaattttgtttttgtatttttagtagagatggggtttcaccgtgttagccaggatggtcttgatctcctgacctagtgatccccctgccttggcctcccaaagtgctgggattacaggtgtgagccatcgcgcccagccgagacagtctcactcttttgcccaggctggagtgcagctgtgcaatcttggctcactgcagctttgacctcccaggctcatgagcctcccacctcagcctcccaaatagctggcaccacaggacgtcccaccaacccagctaattaattttttttttttttgtagagaggagggtctcactatgttgtccaggctggtcttgaactcctgggctcaagtgatcctcccaccttggcctcccaaagtgctgagattacaagtgttagccactgcacctggcctcaagtttctttcttgagcaactaccacatactaggggactttcataggttatcttatttaactctcacaacaccttaagcgttaagtctttatcattttcatttcagagataaggaaacaggcccaagaaggctgaagatcttgcccaaaaccacacagctagtccatgaaactgaacttggactatctacccctcacacgggaatctctctttgatttgagaaaaggaaccagtgcctttcaactggaacagaaaggaatctgatctcaacacctatgcctccacgtaaattatttttttcagccttatttccctcaaaattgtagagtcctaatcttcttctatcttgtggtgtgagaccttggataagtctcccttccaccttttcctattacttaaaatggtgaatttgcataaaccaggctctaagggtcttttctgcactgttcggatgtgtacaaattgacatccaagtttaaaggaagactctgaaacttaggtcaatgacttgcccaaggccatatagcgagggcctgatgtacacatatcaggagcttggggcatcctcagctcaggaaaagggacctcctgggagtgcctgcgcccacacgggatcaaaacggtgcccagccttcagaaacctcagcccgagttccaggggtaggcctgggccgctgctgcccttgtgcggaggcatcccgtgagcatagggcgccatagccaaagaagcgggcagtgggaccatgacgccaggaggacacaccagtccagtcccgttcctgtaggacctcgtttattattacaaggcccatttaagggcacttaggccccactaggctcatcagaaaaccttgaggcggtccctggatttaaccactaatggtgggtttgagtacggcaaagtagggcaccttctacaggcctcactctccccatctggcaaatgggcatcctaagcagccagacacccaagggcaataacgggaaggaaaggtaccctgcatttatgtgcgaggcggggcaaaccgcctgagtcaccgctcacggttgtgtttttccacctcccggccgtccctcccatccgggtgagtcctcgtgggtcctcccggaggcgccccctagtcccaggctctgcacgccctggccccgccccttgactcggccccgcccacagcggaatccgcagattcgccaggtcggatcctcagaattcctcgggtccctcgatactcggctgaaaattctcatcggactctgagaggagcgctgggctggaggcattttccccagggacagaagcgggctattctctcacttgggccagtaagaaaaatccaaaaaaagttgtcgactctgccagcagggattggctaacgggccgttattttcttgactccaccaaggcggatgaaggggaggctacggctgaggccgggaacagtggcgaatctgcagcctctcagaatttggcagtgcaaggaagggacggggaagagaagcaaagcggcgcgcatcctgtccagcgattcgccccgcccgcccggtgaatctgcgtctgcagaacgcgccactgaaggttccccagcgctggctggcctcctcccctccgccccgccccttttcctcagggactagtcgcagctttcgtcgccgccgattcgtcaaggtcccgggccgcagcatctagatcgtcgtggcgaagccgactctccgggggatgcggccaatctccaagctaccctgggccgcaacttccgagcctcccagggcgcnnnnnnnnnnnnnnnnnnnnnnnnnnnnnnnnnnnnnnnnnnnnnnnnnnnnnnnnnnnnnnnnnnnnnnnnnnnnnnnnnnnnnnnnnnnnnnnnnnnnnnnnnnnnnnnnnnnnnnnnnnnnnnnnnnnnnnnnnnnnnnnnnnnnnnnnnnnnnnnnnnnnnnnnnnnnnnnnnnnnnnnnnnnnnnnnnnnnnnnnnnnnnnnnnnnnnnnnnnnnnnnnnnnnnnnnnnnnnnnnnnnnnnnnnnnnnnnnnnnnnnnnnnnnnnnnnnnnnnnnnnnnnnnnnnnnnnnnnnnnnnnnnnnnnnnnnnnnnnnnnnnnnnnnnnnnnnnnnnnnnnnnnnnnnnnnnnnnnnnnnnnnnnnnnnnnnnnnnnnnnnnnnnnnnnnnnnnnnnnnnnnnnnnnnnnnnnnnnnnnnnnnnnnnnnnnnnnnnnnnnnnnnnnnnnnnnnnnnnnnnnnnnnnnnnnnnnnnnnnnnnnnnnnnnnnnnnnnnnnnnnnnnnnnnnnnnnnnnnnnnnnnnnnnnnnnnnnnngtgagtggggccgcgcggcgcgcgtgcgcggtagacctgcttgggggggtgcaacaacgcgccggggcgggaggagagggcagcggtgcgcgttccccccacccccccgcccgcattcgggtcgaagccgggtctcgggctcggtctcgcggtgtttccaacgccccgaagaggtgccacctttcggccggaggatcggggcgcggggaggagagcgggtgtgtgggagccgtggccgggctcggcccgggccgctggccggtgaggaggcgggagggggcggggcctgcagggggcgggggaggggtcttgctccgaggccaagtggggcgcgcgctagggagagcgggaaggtaagggggctcgagacgggcctgggggcctgacagtagagttgggaggtggaaagaggctgggttgttgtggcgaaacagagggtacttgggggagaatccgggggagccccgggtcagggtgagggttggaaactggagtgatgggagaacctggaatcggggctagccaatgaggaaaggcaggggagtcaggccccaagtcctgatccttcttgcgtgtccctcttcccctaacagtgtaaatgagcaaagatggatcaggaaggtgggggagatgggcagaaggccccgagcttccagtggcggaactacaagctcatcgtggatcctgccttggaccctgccctgcgcaggccttctcagaaggtgtaccgctatgatggagtccacttcagtgtcaacgtgagtgcccgggtctttggttgccatccggggagctccaggcgcccgtcctctgtgattctgttcagcacctagaacggtagcctgccttcttgaaagtgggcagttggacccagctcttctgcatgtgtgtgtccagatgggctgcttggagctccctagcctggattcaccctgagctctctttctgctgctgctttccttcctaggactcaaagtatataccagtcgaagacctccaagacccccgttgccatgtcaggtccaaaaacagagacttttccctcccagtccctaagtttaaggtaagtgtctgctgggctcctggtgtggtagtcctaagagggtgtggaggatgcgtcttggcactatagctgaataaaagggtttccaatgaaaggatctcagccagatctagcaacctctgaggctgtgagactcagttgttttggataggaggtacacttaatcttccagaaaggtgcaggtcaggtgtcctaagtgtatccctggtggctggggtgtcgacttcttgaagggtgaggtaaagactctttagctgctatacctatcactgtatattcgtagacagtgcatcatagcacacaagagtgggatctcccagttccttgacagtcaaggggagtgacaaggccactgcctacctgggtagcactattccccgcctctcatttggcgatgtcatttccctcttgtttccttcgaggactcctattctccaccctagacaagatattcttcaggccttgaactgggcctggaacactggtggttcttcatttccttctctgattctttattcttcctttctaaataaattgtttgtggggtcccttcattcttcttcttttttttttttttactttgtacacttcacttggacaatctctttcacacccacagcttcaactattacctaaatgttgatgacttccaagtatctgtttccagccaacatctctaggcttgtatgcctggtagggggacagtttcatttggaggccacacatgtttcagatttaagggatttaaaacaaattatctacctccttaacctacctttttcattttccctctactcatatgtggcagtaccatcgactcagctgtacagcctggcagcctgtgattctctccttttctctctcagttggtcaccgaatcctcctggctcttttcttttttattcttcatctttctattctcattgccacttaatgtagaccttggtattcatttcacctggtctccttgccttcgttcttgcctcagtttctcctctgccttgctgtcatttgtctctttggcttcactacgctgctgttttccttttgttgccaagtccatgttttgggacactgacatgtatggttattgacctggccaagccttatcctccgccttgacaccacacccctgtgttacatccacaccataacgctttgcggtttttcaaaaacaccaagttgttttatatttccatgttccaggggtccttgtcatttgatgaattgttaatccccaaatctcagtaagaatgacaccatctttatgaattcttccctgatcatactctgtacaaaagtttccttccctgggctccagaacaccatgtatgcgtcagctgccactgggtcgtgttgtgtttgtatgtgcatgtcatgctgcttttctgtatgggaatctcttcctttctatctctgtatttccagtgcctcgttcatggtagttacctagtaaaggctgagctaggaaatcat

SEQ ID NO: 97655 - DNA, 18354 bp, Homo sapiens
gaggaagagggaggaggggtagggaagtcctggcggagaagcgccctaagactccaaaggagacaacaggagtttgtgctggagctcccccgctgcccatcggccgttccggatcccctaaggcccaagtcggacagagacggaggaaaggaggaagagacttttatgtcggcggacaggggagctgtacccgtcaccgttgcctcacatccggggctttggagggctggcctcgctgccccgccccgcctcgcgcctttcatggcgaccggaggcggaggctggaggagctgggcccggaggaggcccctttaaatctccttaaaggggtggccactgaactcggcggactgcaacgccagccttaaaggggaagccgccgagcagacgctgacaaattgagaactgtgccgttgggagaactggggcgagtggggtttttctttacgtcctcctcccccacacacaagaagtcttttaaattcaacttaaaggggaagtggccgcttgtggaggactagaaactaactccgagcccttaaagggacggcctgctgttagaaggaccctggactccttaaaggggtggcctctttgagccggaggacttgagacacttttaaaggggaggtctgcgtttcggggcgagctttcggccccttttaaaggggtggcccttcctcttcctcggggagacttgcatcgacccctggcagggggtggccaccgcactaggccgccggacactgtcgggtcgtcttaaaggggccgggagctggacaacttggggcctcgccttaaagggacggccgccccgttttcgccgtcgcggccccgccgagcccgcagggggggccctcgggcttgtcgccccgggggcggcgccggctccccgggccgtggccttggggcaagctcggggccagcagatccggctttaaaggagaagccgtggccctctcgtcactgtgcagccgccagcgccgcgcctgcgaccccgggcctgcggacaggccgcttcgggccccgccgcctccggatgcggcgctgagggcggtcgccatggagacggcagcggccgcggccccgggtccgggctgggcagcagagggggagcgccgacggcggcgctgctcgcgccgagaccgagaccgggagcagcggcgccgccgaggtccaggcggcgacgcgccccgggccctgttggccgccccgcgcggctcctcgtcctcgtcgtcgccgccgccgcccgccaggccttggtcgtcagcttcgtctggagagcggcctgggggcccgagacgccggcggccccgtccgagacctcgacccccgcgaccccgagctcggaagcggcctgccggctcgggcagccgcggggaggaagaggaggaggaggaggaggaggggggcgcagacgacggcgaagccgaggaggagcctgaggaggaggaagaggaggaggaggacttgatcgatggcttcgccatcgccagcttcgccaccctcgaggccttgcaggtggggcctaatggggctaggagactttgggggtttccgaggggcagcaaggagggggcagtgcccctagtgggtggagttgaggggggaatgctggcaccccaaaccagagcaaccggctcctctggccaggcctctgccccgccctggggtgggaggaggtagagctcgtctctggggacccggtttcccggcccgaggggtacttcggcaacctggtcacccctagaggggttgggagcttgcccttttccatctatctcagccccacctcctcctccacagaaggatgcatctcttcagcccccagagcgactggaacatcggctgaagcattctgggaagcggaaaagggggggctccagtggggccaccggggagccaggggacagctctgatcgagagcctggccggccccctggggatcgggcccgaaaatggcccaataagcggagaagaaaagaggtgaggttgtcccttaaaactctttaggcagaatgtatttcccacagccccgtttttcatcagcaacgccactgccccttgtaaacagagaccccagtttctaagggcaaagaggcaagcagggcaaatttgagcccttactcatccgggtctgacgaaggcctgtctacagtcaggtgcacctccttttgcctggttctgtgtctacttcaaacgttttgataattcagagaggcgtcaaaggaatatagttgggtcgtaaattaattgtggttcctgcccttcctcgaggtggtggcagtccagcagaaaagaaatagccagcaagcaaacacctagaccttaatttgagaagctacagaagacaaagatggggagagatgctacagaaacccacatgaggaagccgcttgtgctgcctgggggatgggaggagagttgtggttggggaaagccccctaggatgtcttagtcaggtcctgaagtatagtcagaagtttgctaagaaaagacacggggaaaagttgttttgggcaagagcatgaagacgtgaggacccggcgtatttagagaatggtgagagcactgggacccgggtgggcagtggcgggagaagcagctggaaggagaggctgagagtagatcctggaggcccatgagcgccctgctgggagctgcgactttcccagctgcctcagcagccgcctccctcacctctggactctggtcttcctcaggcgtcctcccgtcactctctggaagctggatacatagtaagtgctatccacctgtcctggcccctccctgctccaccctgggcctcttccctctcgtgacacctctgtctttccttctccccagtgtgacgcggaaagtgatctggacgagagggtgagtggggctagagcttgggtgggcagtgtcactgcttgtaaaagggactgcagcataaaggtcttctgcgtgcagcagacagccttcccttgagtgagaaacatggcttaggttgagtcaggattaggtttttgggaggaacgggggtggattgggagggtaaatggcgtcattttttcttttggtgactaggggttagctgaccaaggaatggagggtccatgctttggcatactatcctttccaaagcccttgagctacttctggttctccacggaaacccagagtggctgtggcactgagatgggccttcttcccatcttagaatgaagatctagattcaagtctgagcagagaccgcagatagagtagtgaggacactaaatcattgtagtcagtgtagggactcagcccataaaggtgtatttgagtttatccttaggggcgatttgcttgttgtgagatagtatgtcctagaagttaatgcgctacccattgggcccatgtaagtaactcaatttgcactccctgatgtgtgtcttgtttttgtttcaaaagttggctggataggactgtggtgaaccagagggttcttgtcaatttccgtcatccatctctatctgtctaggctgattgttgctacgagaacagggggcccattcttgaggcaatctgcaagcctgagttttaatgaggaatctccggattcttaaatatctgcagttggtttaaaacttttaccaacgctggtggaccaaataaatctgtaagcgagggaggcctgtgggccagcagctagtgacctctgacgttttggtttggtttgcctgcttctctgctgcttcaacgctgcctccatttagtcctcttggcctatcggattcttggggtcagctgctccactctgctttttctccaagctcagccccctagagcccagtctttgatggatctcagctaaactgaaggaacagacttgccactaccaccagttcctagcagcctccagaggctatttggccttcctgggtggaggcctggcccacccacaacctaactctatcccttgcccttcttccccaggtctccgatgatgacctcgacccatcctttactgtctcaaccagcaaaggttggtcccaaggtctggggctggaggcacgggagggcagtggggtgagcatgagcctcaactgagcatgtctgccatcctgccccacagcctcgggcccccacggcgccttcaatgggaactgtgaagcaaaactctccgtggtccctaaagtgtcgggcctggagcggagccaagaacagcccccggggcccgacccgctgctagtgcctttccccccaaaggaaccaccgcctccaccggtccctcggcctcctgtctcaccccctgcacccctgccggccactcccagtctgccacccccaccccagccccagctgcagcttcgggtctcacccttcggcctccgcacttctccatatggcagcagcctggacctcagcactggcaggtgagtggtcttgggggattgatgcggtccggaagggcctggtcagtttggtggcggggacacaggatggtacctgtggggtatgacttgaaaaaggattctgagactgaaaagtttgagaaaaacaaatggaaagagatgactgcaggacttatttgagtccgttacacattcccatgcaggggaatccaggctgtgctgtttcccagttgtgtttgctggtgagaacgttttttcaggcaggcaagtctgctcggaatagtgttctttggaacatactttgggaaatgctgacatgatggttaagagcgctggctttggtgtcagacccagattcaaattcttgctctgacgcttcctggctgtgtgatttttgacaagtcacttaacccctctgagcctcgatttcctctttctgtcaaatggaatgatcatagtactttcatcttaaagctgttgtgaggattaactacgagtgaatgcagtgtttcccaaagtgtgtacattcagcgtcagtgatatatgggatgatttcaggtcttacgtgagtaaactttaaaaaatagtcctgagttagcttttgtgaactttagaaagctgagtgtcatgcctcagccccttgatttcacacgcgattgcttagggggaggctaagttaaaaaaaaaaaaaaggaaattgagttcttaaaagaagccattgatgcagttcagatggttactttgctgggcagcagtggggaaggtggcgtggaatgttggagacttggattagcttttaaagcaggtgccagcacttggcctacagcaggtgcttgccacagggtaagaactattgacacttactattgatgctctattttgtcaccgtcattgtcattgttattattgagaaaactaaggctcagagaggggcagtgacttgctcaaggtcaccccgggcattcatggcaagatgggcctagaattcaggtctcctgactcccaggccaggccagtgtggtgctgcttccactgttgtagggtgggaccccaggtggcttgttctaattaagcgtcaacatgaatgatctgttctgtgctgtggttgagtcagaaagggaaagtcatctggccagagatggcagaggcagctgcgtggatgcagagacctagacagggagaaataggggttgctgggtgtgggaggcgcctcagtctgagaacggattccctcggtggggggcggtcctggggctgggttctgccacctcccgtgttggagaaccagggtcacggtatcacccaggcttctgaccccctcccgtcagagctggcacctcccaacccctcactcatctccccacttctctccccagctcttcacggccgccccccaaggccccggcccctcccgtggctcagcctcccccctcatcatcctcttcgtcctcctcctcctcatctgcctcctcctcgtccgcgcagctcacccaccggcccccgacgccctcactgcccctgcctttgtccaccacacagctttccccctcccgggctgcggccccccccaccaccccaccacccctccttgttctcccctggccccaccctgcccccacccccacccctgctgcaggtgccagggcaccctggggcctcagccgctaacgccctttctggtgagtttggggtcctggccggggggtggggggccatcaccccgggctcgggcccagttggctttggggcacctgagcctcagcagacagcagggcttgaggagggagtggctcgaggccagagggaaggcagtcacctgggcccaaggaggctgatgtggcgacagcattaaagccttctcccgtcccctcccacagagcaggacctgatcggccaggacctgaactctcgctacctgaatgcccagggtggccctgaggtggtgggggcagggggctcggcccggcccctggccttccagttccaccagcacaaccaccagcaccagcacacccaccagcacacccaccagcacttcaccccttatcccccgggcctgctgccaccccacggcccccacatggtgagctcctcattgggctggcgatgaggctcggaggcctctggggagggcatggcttctgggggaaggcccgggtccctggctggcagcttactcttcccttctcttccctagtttgagaaatatccaggaaagatggaaggccttttccgacataatgtgagtgtgtgtgtgcgtgtgcgtatggggtgtgtggtgtgggcgtggatgcatccatgcttgtgaccctgactgctggggtccagtcttcagcacaaaagcaagagccttgagcctgggacagctccctggggggctttagggtggaggcccgtggactgacgggcaggctggacttgggctgcgcctccacccccacctgtactagtcccccttctctccacagccgtacacggccttccctcccgcagtgcccgggctgcctccgggcctcccgccggccgtctcctttggctccctgcagggggccttccagcccaaggtgagctcccaatccagacaccaccaccgcctaccatcttgacaaacccagacacgccgggtccaagcacccttctcccattccccaaagtcgtgcccatcctcctgccctgccctgctgcacccagttttctccaaagccatgatccctccctgcccagtgtcccagcttggttctggatccctttgtgcttggtgccagctctcctgtctgatccctccactcccctttcccagagcacgaaccctgagctgccaccacgactggggccggtgccgagcgggctctcccagaaggggacacaggtgagggggccagggcaggtcctgggggagctggaaggtgtgttgcggggagaacagaactgacttgaggagagtgaactgctgattcctcccttgaattcacaatcgggtgttcctgggtgtctaatagagagggaatttctgtaaatagctggctttcccaggcatgaggaatgagagtttcatgagcttgtcccagaaataggatgattaggacaatggtttttgtagtggttttcaaactttttaataaagttacaaaacactttttttccaaatgacatcataccaggaagccctgttcggaaaacaaaagataagctgccccttggtgaagtgaggagagccagagcctccctccccttagcacttgcagcagtgtagaccccagggctgcgggaacgttgtgaaacgcacaggaccagtttcctacagggaagactaggccagaggttttccaacttccttcaaaggcattttccctaaataaatcttaaacagaccgctatactctaaagttggtaataggagagcttctctgagaaacctgtcctgcctgccccctcaccacccgcagccttccagcaggrcagctccctggggcttggttcagaaaccttgtgctggaggagagatgcctagactgggagagatggggaaaggagtttgggcctgagcaggaagggtttgagggagtcccagtgtctcaggcatgttgggggtgagtggatgctgtggagatgcgaggcgcctggcccaggactcgggtctgagtcgcctcccatctctcctttgccatccmcagatccccgaccatttccggccacctttgagggtgagttgtgtgaggacctcaggctgcatgaggctgggggctggtgttagcatgtttggctraggggggttttgcttacaaataagtgagaagcccagaacatggaggcagccagatgtggaacagcagagagtgagggctttcaagttgcagacctgggctcggatggaactggccatgggaccttgggcaaggcagttgatctctctgagcctcagtttcctaggctgtaaaatgaacctagtcatcccttggttgtaggaatgatgagtagggatattttgtggcgaggctgggcccagagccaggcctggagtggatgatgagtgaacgttctttccttccctttccctttggtcatccttctggggcggcagaaaccagggaagtggtgtgccatgcacgtgcgtgtggcttacatgatcctgagacaccaggagaaaatgaaggtactggggccggagggctggggagagtgggtctcagagtcaggggaggactgagctctgggcattggccctcaacagagctcagcagaatcttggccagaaacattctctcctgtcccccatcactgctgaacagttctatggctggcaccttagttctctggctcattagggggctgctcagagaaggctccgagagaggcagaagataggcatccaggccccatctgggtgccagccagcctttggaggggaaccacgggtgagagagcaagagggggaccagactggctcctcatgtactgcccctctccctgtgtcccacacagggtgactcccacaagcttgactttcggaatgacctcctgccctgccttccggggccctatggggccctgccccctgggcaggagctctcccacccggcctccctcttcactgcgactggtgagtctggccagccccctcgggcctgaggttccctgtctatagcctgaggcccagcttgtgcccactcagcctcatcagaatctcccacctctctgccccaggtgccgtccacgctgcagccaaccctttcacggcagctcccggggcccacggacccttcctgagccccagcacccacattggtaagagccaagggcktgttgggcaacccaggctttgtccctgacttccaggagatggaaatcagacccagcaggcagctggaatgcaggatagacctggttccacttgcttagtgaccttgggcaggttactctaccccctctgagccttgatttcctcatctgtaaaatgagtagggaagggcagggtgacttcagtctctgccagctggagccctgtctcccagtagccagtggcaggggcagtacgccacctggaaggggaaggtggggaggccatgctggcccaggggagagcatggccactgactcctaggatcttggcaggcttcttggggaggtttcacctgggtttgggtggacaaggaagagttgagcctggtggcttggagaaaggtgttcctggctggggacgtggtgacattccagtggcgggataggttagttgttctgtctggctgtgtgacgcatgcatgaagttagggtcaggtcgggaagggccctgcatgtcaggtggggggaagccaacaaggtcttcaggcttgctgcggagcggagatctgctgtgatgggtccaggcggctggtgttggggagttggggagaagagcgtgacttcatgtcaaggaagccctgggttggtaccgctccctggctagatgaccaccagcaagtcatttcacctctctgagcctctctgttttatcatcttcaagtgggcatgatcctaaccacctcttgggctttttgtgaggttaaccgacagggtgcttgtcaaagctcaacaccttcctggcccaaggaagtgctcagcacatggctgctgaaagcaggcagctgaggactccaggcaccggtcctgcctctgcccagccaggcctggtgcctgctcagcaccggctgcccagtgctctgaccacccccctttcctcccacagatccctttgggcgtcccacaagcttcgcctctttggctgccctctccaacggggcctttggaggcctgggcagccccacattcagtgagtgcgggtgcggtggggtgggggggctgcggccacagggtgagagctcagacggtctgggaggaggcctgaacagggcctcccacttctggcccctgtcactctctgcttcaccctctgcccagactccggcgccgtctttgcccagaaagaaagcccaggggccccaccagccttcgcctccccaccggacccatggggccgcctgcaccgcagtcctctgacctttcctgcctgggtccggccccctgaggccgcccggactccaggctcagacaaggagcggcctgtggagcggagggagccctccatcaccaaggaggagaaggacaggtgtgcctcccacccacccygcccctgccccaccctcagcccctgctgcccctggagaacttcattctctccccacrcctgccctccagggacctccccttctcacggccccagctccgagtttctcctgctactcccaaggcccgggctggtgaggaggggcctcggccaaccaaggaatctgtgcgggtaaaggaagagcggaaggaggaggctgcmgccgccgctgccgctgctgctgccgccgccgctgccgccgccgcagcagccactgggccccagggccttcacctgctgtttgagaggccccggccgcccccgtttctgggccctagcccaccagatcgctgtgctrgcttcctggagccaacctggttggcagcacccccacgcctggcaaggccaccccgcttctatgaggcgggtgaggagctaactggacccggggccgtggccgctgcccgcctctacggtctggaacctgctcaccccttgctctacagccgcttggctcctccaccaccacctgctgcggccccgggaacccctcaccttctcagcaagaccccaccgggagcccttttgggggcaccacctccgcttgtgcccgccccccggcccagttccccacctaggggccctggcccagctcgggctgacaggtgaggggaacggsggggggtcggggcaaagctccatctccccttcctttaaccaggtcctagggctgaggttttaagccagggctggagggcaaaggtcataacctcaccagccacctctgaggtcatggaacctgggaacagaagcctcaacccccacaagaccaagcatcacatggagtgtagggtcactrggagagcagaggtcacagcctctagagaagggagaggggcgtgtgcatgggagtgtggctcatctcgggggccatggggcctcctgaggtacacctttgcccctgtaagggcctctaggccctgggcctgcctccccaagggctcactaagccagaggccaaagtgccccctcccgttcacctaccacccaagtcctcatgccctccgagggctgggggaggaggggctcaaggaaggggggttccatgtacatatttatcacccctttcacatagccccaagaccttttgtacatttttacaggggtgcccctcccaacagttcccttcctggttaattaaaccctcagactggtgctgtgttcctagcctctggcctctctgtggggaaaggggactgcagggggaagagccgggaagggacagtcaggcttctccctgggaaggtggggccagcaggagatgaccaacagggggcaggacctggggacctgggctggagggaagggcagaagcttcctacttggctgacagccccggttcccccaacatgttcccgttcactctgcccccacccccaaaggctcagcctctaaatctcagactccaccacctcttaatggctcagtccccttcaccccatttccaagtgcccccaggactcctgggccctgcttccctgaaccctgttctccaaaaccctgccccaggctaagggtggccagagaaggtcaccatgtaccacacaccaaagaagggggtcggcccaggggtgggcgacacaggcagcttcttcggcagcstcacggcagcaaccccagccttcccaaagcagcaggcgcctccaggctggggcccaacctagaaggcaggggtcaatctaacaaaaccctaacgttgacttttttccctggtggggcttcttctgtaacatgacttgcgaatatttatataaaaacgagtgttacaatgagacccccggctcctctttgagtgtgtgtggggtgggttggaccagggtggggtgtgtgggtcctggggtaagggagggatgaggacagtactgtccgtatcccgccaaggttttcctccctgccatccactgggcaagttggtctgccatttctggagggatgggttcgagggttgggcactgaagtttttcacactgtttttctataatccaggaatacatagtatgtaggattcaagcaacccagtaagacactgagcaaaacattaaatttctccttcacctgccaaccttcccaagccccatccccttcccccaggtaaccgctgtaaatcattaggtgtatattcttcaggtcctttctatgtgttctcgcacatgtctgcacaggcagagtatgtttaaaaagatctgtaatttaaaatttttctggtttttgtggagtaatacatagtcattataaaaccattcaaacacacaaatacagaacacggagggaaagtgctccatcatcccacctcttgaggataaccagttttttgctttgttttgttttgttttgtttttttgagacggagtttcgctcttgttgcccaagctggagtgcaatggcacgatctcggctcaccgcaacctctgtctcccgggttcaagcgattctcctgcctcagcctcccgagtagctgggattacaggcatgcgccaccacgcctggctaattttgttttttgttttttttttttttttaatagagatggggtttctctatgttggtcgggctggtctctaactcccaacctcaggtgatctgcctgccttggcctcacaaagtgctgggattacaggcgtgagccaccgcacctggcaaccactgttaattttcggggaaattcctccagttatttttctagctactacaggtcactgcaacaaagcgaggcacatgaattttttcatttcctggtgcatataaatgttatggttctggctgggcatggtggctcacgcctgtaatcccagcactttgggaggttgaggcagatggatcacgaggtcaggagattgtagaccatcctggccaacatggtgaaaccctgtctccactaaaaatacaaaaattagccaagcatgatagcgtgcgcctgtagtcccagctactcaggaggctgaagcaggagaattgcttgaacccaggaggttgaggttgcggtgagctgaggtaacgccactgcactccagcctgggcgacagagcgagactccatttccaaaaaaaaaaaaaattactgttccacaatactgcagtcttaagtgagcaatagtgttatgtctatgaaaacggtacatcccttaattttttaaatgctaacagtcatctgagcttttgcaagtcgtaatctttttgctggtggaagttcttgcctcattggtgatggctgctgactgactgaggtggtggtcggtgaaggctgggatgacggcggtttcttgacaacaaggaactttgcctccttgattgcctcttcctttcacttgaacacttagaggccattgtagggtgttattaattggcctagtttgaatattgtctctgggaagagggaggcccaagcacagagagagaacagttaacacacatttattgattgagttcgccctcttacatgggcactgtttgtggcaccccaaagcaattacaatagtaacatcaaagatcacagatcactataatagatacaataatggaaaagtttgagataatgggagaattaaccaaatgtgactcaaacacgaaggccaggcgtggtggttcacgcctgtgatcccagaactttgggaagccaagatgggtacatccctgaggtcaggagttcaagatcagcctggtcaacatggtgaaaccctgtctctactacagaatacaaaaagctgggcatggtggctgactcctgtagtcccagctactcaggaggctgaggcgggagaatcacttgaatccgggaggcggaggttgcagtgagctgagattttccagcctgggtgacggggcgagactctgtctaaaaaaaaaaaaaaaaagcaagtcactactaaactgggctgtcagggctgttgcctacctgagctcctatagaattgactgagtgaccttattctaagtatgcctgctttttttcttttttgagacagggtctcactctatcacccaggttagagtgtagtagtatgatttcagctcactgcaacctccacctcctgggctcaagcagtcctcccgcctcagcctcccgagtagctgggactataggcatgcaccaccacacccagctagtttttgtattttttgtagaaacagaatttttccatgttgcccaggctggtctcaaactcctggactcaagctatctacccccttggcctcccaaagtccagggattacaggtgtgagccaccacacccagacttgttttgcttttgaggcagcttttgagcaaaacaacagccggtctgttgcccaggctggagtacagtggtgcaatcacagatcacttcagcctcgaactcctattcccaagtgatcctcctgcctcagcctctcgagtagctggaactacaagcctgtgccaccacatttggctagctttaaatttttgtagagacagggttcttgtcttgttgtccaagctggtctcaaactcctggtcccaagcaatcctcctgcctcaacttctgaaagcgctggaattacaggcgtgagccactgtgcctggcccataaatgtacctgttgccttaggaaagatgcagccaacattccctgccaccaccacacatatccaggatgtctagggaaggctcaagcctagattgctccaacagaagtcagaaacaagtgaccagaaggtgaacgttggcttgcagacaagatttcacatggaagttcttgttttcagcttctcttgaaaaatccaaaaatctgtggtcactagacctgcttacccccatggctttcctttgaaatggggcataatctcaccagattgcgactgtcccctccacttgttgtcttggagtagaccacagtcactattcaggctacctctctggcccctataggcatttgagagtgactctcagtgaaatattttctttctttctctctctcttttttttttttttagacagagtcttgctctgttgtccaggctggagtgcagtggcacaatctcaggtcactgcaacctgcgcctcccagattcaagcgattctcctgtctcagcctcgcaagtagctgggattacaggcatgcaacaccatgcctggctaattttttgtatttttagtagagacaggagtcacactaaatgttggccagcctcgtctcgaactcctgacctcaggtgatccgcccgcctcagcctcccaaaatgccgggattacaggcgtgagccaccgtgcccagtagagttaaatattttctagacatgcctatcccacctctcctagatctctccccaagcacctcagatatcccaaattaagtcatcttcgagatctgatgccccacttcccccaaggtttccatctctgtgtcatcagcactcaagtcagaaacctccctcttccctcacttgatgcagtttctgagctgcctttgattctttcaaccactgttgacttcatccacagtgccaggcactgcacttagtggctggggatacagaggtacacaaaacaaaccccagccatcctggagcttacattggactatgaaagaggacaattacagaagctaatgacagaattccaagggccaggcgtgccgtctctgcctgtaatctttgggaggctgaagtaggcagatcacctgaggtcaggagttcgagaccagcctggccaacatggtgaaaccctgtctctattataaaaatacaaaaattgccaggcgcggtggctcacgcctgtaatcccagcactttgggaggccgaggcaggaggatcacaaggtcaggagatcaagaccatcctggctaacatggtgaaaccccgtctctactaaaaatacaaaaaattagccgggcatggtggcgggtgcctgtagtcccagctactcgggaggctgaggcaggagaatggcgtgaacccgggaggtggagcttgcagtgagccgagatggcgccactgcactctagcctgggcgagagtgagagactccatctcaaaaaaaaaaaaaaaaaattagccaggtgtggtggcacacacctgtaatcccagctactcaggaggctgaggcaggacaatcacttgaacctgggaggtggaggttgcagtgagccaggatcgctccattgcactccagcctgagcgacagagccagactccatctcaaaaaagaaaaaaattcatttttaatttttctgggtacatagtaagcgtatatatttatgtgttacaagatattttgatacaatcatgcaatgtataataatcacaaaaatatggaaagcttcacgaatttgcaagtcatccttgctaaggggccatgctgacctctgtataatgttttagtatatgtggctgggtgtggtggcccacgcctgtaatcctagcactttgggaggccgaggtgggcggattgcctgaggcaggagcttgagaccagcctgggcaacacggtaaaaccccgaagtcccttcctcactcaggccgaggcaggcccttgagcccaggagttcgagaccagcctgagcaacatggtaaaaccccgtctctatgaaaaatacaaaaattaggatgtgtcggccgcacgcctgtagtcccagctacttgggagactgaggcaagaggatcacttgagcccaggaggttgaggctacagtgagcaatgatggcaccactgcactccagcctgggagacagagcaagaccttgtcaagaaagaaagaaagagagagagagaagagagagagagagagagagaggaagaggaaagttatacatatacatgtttgttatttaaaagtagagatgggagctgagcacaatggctcttgcctctaatcccagcacgtcagtaactgaggcaggaggatcactggagctcaggagttcaagacccgtctttatgtaaaaacaaaaccaaacacatggccaggtgcagtggctcacgcctgtaatcccagcactttgggaggccgaggcaggcggatcacctgagatcaggaatttaagacgagtctggtcaacatgacgaaaccccgactctacaaaaatataaaaattagctgggcacagtggtgcacgactgtaatcccagctacttgggaggctgatgcatgagttgcttgaaaacgggaggtggaggttgcagtgagccaagatcgcaccactgcactctagcctgggcgacagagtgagacttcgtctcaaaaacaaaaacaaaaacaacacagatctctgtggatagacatttaagttgtttctagcatttgtgttatgacaaacaggatttctggaagtatttttattattttattattattgctgacataaaattcacataccatgaaatgtaccttttaaagtgtgccattgcagtggttttcgtatattcacaaagtcgtacaaccattgccattatctaattctggagccattcagaaacacccatttttttatggccatgtgtgcatgtgtcagaagaaggcactcttggaggtgcagctgatgggttgtacaaccactgccattatctaatcatggagacattcagaaacacccattttgtatggttgtgtgtgcctgtgtgagcagaaggcacctgtggagatgcagctgatgggctttggggtgatgagtccttccaacggaaagaaagcagggcccagaggcttgggatcaccacattacccctgctacactgagcaatttgcaatgactgccagtccctcaggaaaagttagttctatctggatttttgcacatcggatttccttcaagcag

SEQ ID NO: 97656 - DNA, 17743 bp, Homo sapiens
ttttcttttttttttttttttcaggtgtgacagcagcattcaaaacgactttaaggattatgtctgcaatgcagactttacacctctcctgcaaatggcccatcctctaaaatatctgcacagtaattgcaagtggggactttcaaaattcagatattccattttatttaatgctgaaacactagtacctacatttgttggtgatgattaagtctgggtcaaatcaagacagagaaaccacatggtaatttgaacaaggaaaggtttaatattttaaaaaaatcaacaatagccaagtgcagtggctcatgcctgtaatccaagcactctgggaggccgaggcgggcagatcacgagttcaggagatcgagaccatcctggctaacacggtgaaaacacatctctactaaaaatacaaaaaattagctgggcatggtggtggcaggcacctgtagtcccagctactcgggagcctgaggcaggagaatctcttgaacccaggcggcagaggttgcagtgagctgagatcatgctactgcactccagcctgggtgacagagtgagactccatctcaaaaaaaaaaataataatataacaataacagaggattagagaaatgattagattgtgtattatttttctaaaactgacataacaaattaccacagattcattcaagagggctcagcttcaccccacctcccagactggaatgcaagtcatagctcactgcagcctcaaacttctgagctcaagtgattctcccacctctgcctcccaaagtgctgggactacaggcatgcaccaccatgccccgctaatttattttactttttttggagagatggggtctcgctttgttgcccaggctggtctcaaactctttgcttcaagcaatcctcccacctcagcctcccaaagtgctgggatgacaggtgtgagccaccccgcctcgcaagaatccttccttgccttttccaagcttttggtggctgccgacaatctttggcattccttggcttgcagatgccacactccaattcctgcctccattgctacatggcattctccctctgtacgtctgtgcctgtcttcacataacattctcctttctatgtgtctgtgtccaaatttccctcttcttgcaaggacaccagtcattatattaccgcccatcctaatccagtatgatcttgattacatctgcagactctatttcctaataaggtcatggctgggcgtggtggatcattcctgtaatcccagcactttgggaggccaaggcgggagcattgcttgagctcaggagttcaagaccagcctcggccacatagtgagaccttgtctatactaaaaaaaaaaattaaaaattactttgggaggccaaggcaggtggatcacgaggtcaagagattgagaccatcctggccaacatgatgaaaccctgtctgtactaaaaatacaaaaattagctgggcacggtggcacatacctgtagtcccagctacttgggaggctgaggcaggagaatcacttgaaccctgcaggtggaggttgcagtgaggcgagatcgcgccattgcactccagcctggtgacagagcgagattccatctcaaaaaaataaataaataaaaataaaaattagcagggtgtggaggtatgtgactgtggtcccagctactcgggaggctgaggcaggaggactgcttgaacccagggggtcagggctgcagtgagccaagatccagccactgcactgcagcctgggtaacagagcaagatcctgtgtcaaacaacaacagcaacaacaacaacaacaacaacaacaacaaaataaggtcagattcagaggaagtgaaaggttcaagatttgaaaatatctttggtggggtgggggggaggtggggagacaaaattctgcccactacagataataagaagtaaacagaattctaaaaaaaaaaatgcaagaagagcagatattaggttggtgcaaaagtaattgcggttttgccattacttttaatgacaaaaaccacagttatttttgcaccaacctaatacaaggagcagccacagctcctctcaggcggagacagagcatacaagaaaaaggctccttctggccaggcgcggtggctcatgcctgtaaccccagcactttgggaggccatagcgggtggatcatttgaggtcaggagtttgagaccagcctggtcaacatggtgaaaccccatctctactaaaaatacaaaaattagacaggcatggtggcatgtgcccgtaatcccagctacttgggaggctaaggcagaatcgcttgagcctgggaggcggaggttgtggtgagccaccacactccagtctgggtgacagagtgagaccctgtcgaaagaaagaaagagagagagagagaaggaaggaaggaaggaaggaaggaaggaaggaaggaaggaaggaaggaagaaagaaagaaggaaggaaggaaggaaaggaaggaaggaaggaaggaaagaaagaaagagaaagaaagaaagaaagaaagaaagaaagaaagaaagaaagaaagaaagaaagaaagaaagaaagaaagaaagaaagaaagaaagacagacctccttccttcctgagatccacaagtttttggagagggcacagaagtacagaagtcgctgaagtacagtagttgctggagtgtcagtctggtggaacttgctggaaatccaccctcttgggtgccagggaaagctgttcatgggcaggtgtctccacagaggaactccactgcaaaaccatccagagggcacctgggggagctgctgaccctggggttctgctggccaccctgccctgcagaagcagggagctgggaacccacttgtgctgcaggagcctcccaggagggtttgctgaactgggaagcaaaactctttcttcctgcaatgtctctccagccatctattgacaaaacttagcatgatgctggctggtaaaaaaaatttaaatatatatatatatttaaagggtccaggccaggcgcggtggctcacgcctgtaatcccaacacttggggaggccgaggtgggcggatcacgaggtcaggagatcgagaccatcctggctaacacagtgaaaccccatctctactaaaaatacaaaaaattagccgggcgtggtggcggacacctatagtcccagctacttgggaggctgaggtgggaggatcacttgagcccaggaggtcaaggctacagtgagccatgatcacaccactgcactccagcctgggtgacagaccaagaccttgtctaagaaaagaaaaaagaaagatgggccgcccagagtctaaacggaccctgagtttctgaataatgacacactgaagtgcacccacggccacaccagcagccccactggaggctgtgtggggccctcttgctaatgcatcagcatacactgtggtacaccccacagtgtgtccaccacctgtgtaggcagtgggcaaagtaaagttgttgaaatgggaagtcacaaaaagagcagaggtgagaccgcaagatcatgagggctcacatttgctggcctgggctaagggccaagactgccacagtctaccttagacttccatttgatgaactctagcaccccaagttagggtcacactggtgggctcttcctaccaaatactcaggtccaggacttttctttggactacatcttttacccttggtgtcattgacttcaagagacctagagaatcaaaactcagattagggccaggtgtggtggctcatgcctataatcccagcaatttgggaggccgaggcgggcagatcacttgaggccaggagttcgagaccagcttggccaacatggcgaaaccccgtctctactaaaaatacaaaaaactagccggccgtggtggtgagcacctgtcgtcccagatacttgggaggctgaggcacgagaatcgcttgaacccaggaggcggaggttgtagtgagctgagatggcgccactgcactccagcctgggcgacagagcgtctcaaaaacaaaaaacaaacaaacaaaaaatacctaaaaactcaggttaggcctgctctgcttttgaaagtttttcctgccctggggcctgaaaagcacctgtggggtttaggtcttaatttggcaaggttgaaagaatctccaagcactcacagctggatgaaacatcactgtacctcctcaggcacccatactgccagccctgatccagagggagagaaacacctctacgtggaagaaccacggcggcctgctcccaccagaagtctgaatgggtttccagaggacccagcggacctcctgttacagagatgctgtagtcctgcaagaacgtctccctgcatgagtccttagggacggagctggggagcctccatttcccacataagcccttctcgattatgctttccatatcatcccttgtttgtttgtctgttttgagacagggtctctgtcgcccaggctagagtgcagtggcgcgatcatagcccactgcagctgcgacctcccaggctcaagagagcctcccacctcagcctcctgagtagctgggactacaggcgtgcgccaccatgctcggctcatttttttgtatttttttttttagagatggggtcttgccatgttggccaggctggtcttgaactcctggcctcaagtgatccgctatcttctgcctcccaaagtgctgggataacaggtgtgagccaccacacccggccctgttttatcactttcatcactcaatcccctgagaattatgacacctaaaccaggaagcacctctgcaccttatctcggacccaggattctaggcttcagggtctctcgttctgttaagaaaacaaaataaggactcgtgctgggcgctcacgcctgtaatcccagcactttgggacgctgaggcgggaggactacttgagcccaggtgttcaagatcagcctgggcaacatagcgagatcctgcctcaaattaaaaaaaaaaaattaaaaaagaaaagaagtactggtttggaccagggaatctggggaaggagaactagtgcagacatgggctttggttaagcggtcagggcaccttcatagcgctgcaagaagccactacatgcccacttcctccccaccaacagcccagcttccagtaaagggtccatgacgcagctcctccaagcagcagcgtcccaccctgatcccttactcctcaggactatttacacctcccccatcctgcgggccccacttgagacagtggttcctgagagccgggccccactagcaagccaaggtatattcttggcctcctgcaaagatgcccctgtcctatagacctctgcgcggaccgtgggcacccccacttctccaggaagaagtaggtgggcaacactcaggggaagtcaagcttagcgcccccagtctcctccccacttcggctcggtcccatctctccaggacaaggcgccagcaacggagccacaggccgcaccagcccgtctttgatcccgggtgttcggactcagggcctccaccaccccctcctaaactcggaccctgggccgtgggaacccagtttaggaacccaggaagatgccggaaccttcctcaaacgaggccactctaggaaattgggaatttcacatatcgttagcactcagtcgacgtttattggcctaagaacgaaagaaccggaagatgcccttaaaaagcgtggcggcactctagcttcaatcggttgcctcaacatatcaagaaacctggcattgtatatggccctcaaaagatgacgccacccggtccaccacggttcaacgaggactaagacatctgccctcaaccatcatggcggcgccactcagtttggcttcctgcccctagggatgatggccgccaggtggcttcacttagtttctcaccaccccggaagacggggaccggcgattgggcggtgtccagaggctccgagaagaaggccatcggcggttgggcagcgttgggtaagcttggtttttaaaggagccggaggtgggagctgcggaagacccgggatccacgggaggcggcggtgagcagcccttgggggagggcaaggagtggctggagagagggcgggagtgggggcggggaaggaaacttctgaaccatctggtcccgggccgggggagaccgctgggcggggacgcgaggagggaaggggcgtctgtgggcgggacctcccgggattggagtgaagagggtatctgcttgacagtggatccctggggatctacgctgagttcggagatgctccagctcgggccgcccctgtctgagcggagctttgcggcgctgaagcttacaggggaaggaaaagcctcgcccggcgtctgattggcggaaccgcgctgtaggattctttcctcagggatccagtctaggggatctggtgggatggagggtcgtcgatgtatggagtattgctttggagtcctcggccactcgctgggagaggaggaggatcgcagagggatccagcggaaatagcctcccaggaccgggatccccgtggatcccgggggatctcggggcataatctgcagggacaaaggcctcgggaggctcgggccgcgggagaactggggccgctgcattctgggttctggcggcaggtgccaggcagggcgcgagtgatccgctgatcgaggcggtggcagcgggaggacacccgctccgggcgaccggccgggggcgccctttcgcgccccagggctgcggccgctgggctacggggagccgcgggcggaccatgaagggcggagccccagggaaggggccggccctcaccccccgctcccccgctccccccttaccccaggccgcagcctgggattccccagggacccccccggagccgccgcgtctcccatggacttgcccggggactccaggtgagagcgtacccgggcggcccgcctgtcttgaccccgggagatggggatcctggcgaccgtgccgggaaactacagagccagcgacaggttcgggcgaccgtcctctgcttctttcaccctccagcccgcctggccagccgcgtctgtgccgccagcctctgactcgagcattatggggagccaggagccckaaacggccgaggctgcagctcccgggggccccttctcccctggaaaaggcctctcggcgggtcctggccgtggtgctagaagatgtcatggctgttcacatggtgagccccctgaaccaagagactctctattcccccatgactttcctcactaccaaactcgggccagatccctactgaggataactgaagtccaaatccatcattgttgtactcagccctcaggcagcctccctcatggtagagtcctgcttggctcccacttactccaacctagaattgggcagtgcccattccacccaccaacgattttgggctggaaccacatccctgtaactctgagaaactcttctgcttctttttttctatcttttttttttttttagagacagggtcttgctatgttgcacaagctggtctcaaactggcatcaagcgatcttcccatctctgcctcccaaagtattgggattacaggcgtgagccacggcgctgggccgaaactcttctgctttcttcccagcccagcctccttaggaagcaggctgaggtctttgactccactgcacagataagaaaaactggcccaaaaaaggcagtgacccaccctagctcaccctgtctttttcatttctctaaacagcgtggatgagattacccaggtcctacacctgcagtttaggactcttaatatctggcccctaattcagtccaattcatctcttctcttgggatccgagtgaattctagccccaatctctgttatgtttgtggctcagggcactgtgaggcacagggaaaccttgtcccgtccagcctcattctatcaccttgctcttgacacctctttctcttccaggtccccgtggtgccctcaaagcagacctccataccacagcaccacagctaccatcaggatcctgtccacaggcagccgcctgcctcgccaccccggcaggccgggtggtcctcgcaggccaggtgagcatggcaggatgggggtaagccgagggcccagctgagccattttaatcttcctgttccctcgctaggcctcccgaccctctgtgtttgtgtcgcgagcccttgagccgcatccaccggacctcttccaccctgaggcggcgatcaaggacaacccctggcccagaggagggcccttcacaaaaggtggaccgggccccccagcccaccctggtggtgatgctggaagacatcgccagtcctagaccccccgctgaggtatgggaactgagggtacggatgtcaagggttctgctgggttccagcagggatagaagggtaggaggcctgagtcttaggtgggtttttcttggggtgaggaggatggcattttaggcggcagacactgcctgagcaaagactatataaaaacgtctttggcgtgaacccaagcagctatccgggaactgaaagagtcaggatgtggggcactaagggggctttcctgcctccccacaaacatcccctatttttatccagggcttcattgatgagacccccaacttcatcatcccagcacaaaggtgagagggctggagtagggattatcaaaggatccaggcaacagccatcatccaggtagccagagctaggggcatcgggactgactgatccaatccttccttgtggcatcttaaaaagccttaaggggccgggcacgcccatgcctaatgccagcactttaggaggccaaggcaggagaatcgcttgagcccaggagtttgaggccagcctgggcaaccacatcactgtgaccatatctctacaaaacgttttgtttatttatttgtttgtttttgagatggagtttttgctctgttgcccaggctggagtgcaatggtgcgatctcagctcactgcaacctctgcttcctgggttcaagtgattctcctgcctcagcctcccgagtagctgggattacaggcatccgccacaatgcccggctagtttttgtatgtttagtagagacgaggtttcaccacgttggccaggctcttgaactcctgacctcaggtgatccacccacctcggcctcccaaagtgctgggattacaggcgagagccaccatgctcagacaagatattgttttaaattagttggatgtggtggtccatgcatgtagttctagccacttgggaggctgaggtgggaggactgcctgagcctgggagttcaaggctgcagtgagctgagattgtgcccctgcactccagcctgggccacagagcaaggctctgtctcaaaaaaaaaaaaaaagaagaagccttaagggataggggagttgctggctcaggtgggatacctggaagttcccctagcctttaccttgcccttcaccccagagctgagcccatgaggatagttcgccagccaacgcctccacctggggacctagaacccccattccagccatctgctctgcctgcagaccctctggagagcccaccaacaggtaaggacttgggtagagatcggatgagacttgggtgtctgggacatcctagttgagcttggaagtgtcaggtacagagttggggatagggcttaagccacctcccagggcagggcttggtatataaagatgggatgttgatgtcagaggcttgaagttcaattcttaaatgcagaacttagtgttttaagggtgggctaattcccctgtgcacaaagttgagcatgtggggaggggctgagacactgcagccaaggaatatccacctgtgaccctctcctttcctcagccccagatcctgctctggagctcccatccaccccaccaccgtccagccttttacgcccccgcctcagtccctggggcttggccccgctcttccgttccgtccgctccaagctggagagctttgctgacatcttcctcacgcccaacaaaaccccacagcccccacccccstcccccccaatgaagctggagttgaagatcgccatctcagaggccgagcagtctggggctgctgagggcactgcgtctgtcagcccccggcccccaatccgccagtggcgaactcaggaccacaataccccagcacttctccctaagccctctctgggccgaagctactcctgccctgatctggggccccctggcccaggtacctgcacctggccacctgctccaccccaaccaagccgaccacggcygcggcggcacactgtgggtggtggggaaatggcccgagccccgccaccccctcggccctgtctccggaaagaggtcttccctctcggaggagtgggagcctccccttctctcaccacatcttgctcgtccacggcatccacttccttctccgaaccagcagaacccaggtagtgctctcaaaaaacccccttgaagcctggctgcagcctggtcccagcctccttccctgagtatccagtgggcaggagacgggggataatgcagtgaatcctgtttgtccctgagccttgaccttcttggcaggttgggttcaaccaaagggaaggagccaagagcctcaaaggaccaggtgctttcagaacctgagaccaaggtaggcattcagatcgggtagaagagactagtgggggcctgagcccatgtcactctttcacyctctgccccatttttgcagaccatgggaaaggtttctcgattcagaatacgcagaacaccagcccgtcctcagctaaaccttacaccaatgggactgcctcgaccaatcaggtgaggggctcactgggcattgagccatcttggccaaacagatgcaggcttatgtcccctgaagtatagctttgtctcccctcagggagcacagtccagcctgaaagattcaattcrgtgtggggatggtttgtgctcaaaattgcctgtctgccttatgtagcactcctggccctgacatgtcccagaaactgaaatacagaccaggccttacctgtcccttcaggccccactggcccaagrtttctcagtggcctctgctctttgctcacaggttgaacaagaaggagttcagcttggaagaaatttacaccaacaagaattaccaatcacccacaaccaggaggtgagacacttggaaggctagagggtggcagagggaaatctggagctgtggagcaccctgataaaaccagctcctctccctgccttgttcaggacctttgagaccatctttgaggaaccccgggagcgcaatgggactctgattttcaccagctcaaggaagctccggcgggctgtggaatttcgggacagcagccttcctcgatcacgaagaccgtcccgtggggtccgggctgcagggggcaggactgttcctcccaatgtggcccccagccctgatgtgggccccctgctccagcagcggctggaggagctagatgccttgctcctggaggaagaaacagtagatcgggagcagccccactggacctaggtgccccatctgttggtcatccatcctgaagggacaggaaacctcccaggcagttatttttttttctctatatttctagtaaagttttcgatatgtttctgattcttttgtatctctagctgagtttaagattgatttggctgatgtttctacgttgacccccaaaggtctgggaactggggctggtgctagagatggtgacaggggttgggtacagagtacagggagggggtgaagtggtcacttgagatagatagatagatagatagatagatagatagatagatagatagatgatagatatagatggagttccgctcatgtcactcaggctggagtacaatggcacgatcttggctcactgcaacctctgtctccctcattcaagcgattctcctgcctcagcctcccaagtatctgggattacaggcgtgcgctaccacacccgctaatttttgtatttttagtagaaactgggcttcaccatgttggccaggatggtcttgaacatctgacctcaggaaatccgcctgctttggcctccctaagtgctgggattacaggcatgagccaccatgcccggcctagagatactctcttgcttagaggattctcctgtgtggagggacacttctgaatcagtgccagatgatactgtgaccctagaccgtggtctgggttctcccaattcatttatatcaaggagactgaaaggcctatagtgggtcaaggccttgaagatcaagatggccctgaattcctgctaacatgcaggccaggacctgctgctggattcaagagctacggctaggccaggtgcggtggcttacgcctgtaatcccagcgctttgggaggccgaggcaggtggatcacaggagcctaggagttcgagaccagcttggccaacatggtgaaaccccgtctccactaaaaatacaaatattagctgggtgtcttggtgtgtacctgtaatcccagctactcaggaggctgagccaggagaattcacttgaacccgagaggcagaggttgtaatgagctgagatcgcaccactgcactccagcttagggaacacagccagactctgtcccccccaaaaaaacaaaacaaaacaaagagctaagagtaatgggccataatgaagcactcacgacgactgtcataggtgcttgacctgcacatgtccctgcgacagggaattagtcattttatggacgagaaagcaaggcaggcatgtcagcgcgctgtccacttttaaaacggtaacccgggcaaccgaaggccagaaatggctgtctctttttttttaagccagtcacattgagcagtggggtgcatctttcataactgagaggcatcacagggcagtggctgacatagacgtggctaggagactaccagcccgtctgtgcgcgcattcctttccgtcccagtaaaatggggctgacagcatctccttcatggaattattaccaaacgcagtcacaaacgcggagaagcgctcatgcaggtgcaaggcgttttcgaattgctagcactcgggaccgctgccagcagccgcgcctggaagggacgcggctgcctgttagtgcggccggcgcaggcgcaggcacagcacgcggccgctcgggccaccccgggccgcggaacgactcgcaagcagccagcctgacggcggcgccgccacgcgcgtgcgcgagacgccaggctgtctgtgggccgcgccgagcggcggaaaggcggcgatgacttaactggctgtggaacggaacctcttgcagccgcgcgccccccggcggccaaccgcccccaacgcctcaggccccgcgtctccgcccctcgcctcgacgccatcaggagaccggccaataaacaaacagcaggaagaggcggggccctgtagtaaccgccccaaacacctacttctaaccagtcgagtcacaagactggggggaagggcggagccaatccgacgtaacccaatccaagatttgagggcggttacatgcacccactccctcgggtttggctccgcccctcaccttgacgtagccctcccagcctatcaacgactgcgcccgttgggggtgaggggaagggggcggagcgtgggaggaggccgagagaggaaggaggcgtaggctgaggaggaagagggaggaggggtagggaagtcctggcggagaagcgccctaagactccaaaggagacaacaggagtttgtgctggagctcccccgctgcccatcggccgttccggatcccctaaggcccaagtcggacagagacggaggaaaggaggaagagacttttatgtcggcggacaggggagctgtacccgtcaccgttgcctcacatccggggctttggagggctggcctcgctgccccgccccgcctcgcgcctttcatggcgaccggaggcggaggctggaggagctgggcccggaggaggcccctttaaatctccttaaaggggtggccactgaactcggcggactgcaacgccagccttaaaggggaagccgccgagcagacgctgacaaattgagaactgtgccgttgggagaactggggcgagtggggtttttctttacgtcctcctcccccacacacaagaagtcttttaaattcaacttaaaggggaagtggccgcttgtggaggactagaaactaactccgagcccttaaagggacggcctgctgttagaaggaccctggactccttaaaggggtggcctctttgagccggaggacttgagacacttttaaaggggaggtctgcgtttcggggcgagctttcggccccttttaaaggggtggcccttcctcttcctcggggagacttgcatcgacccctggcagggggtggccaccgcactaggccgccggacactgtcgggtcgtcttaaaggggccgggagctggacaacttggggcctcgccttaaagggacggccgccccgttttcgccgtcgcggccccgccgagcccgcagggggggccctcgggcttgtcgccccgggggcggcgccggctccccgggccgtggccttggggcaagctcggggccagcagatccggctttaaaggagaagccgtggccctctcgtcactgtgcagccgccagcgccgcgcctgcgaccccgggcctgcggacaggccgcttcgggccccgccgcctccggatgcggcgctgagggcggtcgccatggagacggcagcggccgcggccccgggtccgggctgggcagcagagggggagcgccgacggcggcgctgctcgcgccgagaccgagaccgggagcagcggcgccgccgaggtccaggcggcgacgcgccccgggccctgttggccgccccgcgcggctcctcgtcctcgtcgtcgccgccgccgcccgccaggccttggtcgtcagcttcgtctggagagcggcctgggggcccgagacgccggcggccccgtccgagacctcgacccccgcgaccccgagctcggaagcggcctgccggctcgggcagccgcggggaggaagaggaggaggaggaggaggaggggggcgcagacgacggcgaagccgaggaggagcctgaggaggaggaagaggaggaggaggacttgatcgatggcttcgccatcgccagcttcgccaccctcgaggccttgcaggtggggcctaatggggctaggagactttgggggtttccgaggggcagcaaggagggggcagtgcccctagtgggtggagttgaggggggaatgctggcaccccaaaccagagcaaccggctcctctggccaggcctctgccccgccctggggtgggaggaggtagagctcgtctctggggacccggtttcccggcccgaggggtacttcggcaacctggtcacccctagaggggttgggagcttgcccttttccatctatctcagccccacctcctcctccacagaaggatgcatctcttcagcccccagagcgactggaacatcggctgaagcattctgggaagcggaaaagggggggctccagtggggccaccggggagccaggggacagctctgatcgagagcctggccggccccctggggatcgggcccgaaaatggcccaataagcggagaagaaaagaggtgaggttgtcccttaaaactctttaggcagaatgtatttcccacagccccgtttttcatcagcaacgccactgccccttgtaaacagagaccccagtttctaagggcaaagaggcaagcagggcaaatttgagcccttactcatccgggtctgacgaaggcctgtctacagtcaggtgcacctccttttgcctggttctgtgtctacttcaaacgttttgataattcagagaggcgtcaaaggaatatagttgggtcgtaaattaattgtggttcctgcccttcctcgaggtggtggcagtccagcagaaaagaaatagccagcaagcaaacacctagaccttaatttgagaagctacagaagacaaagatggggagagatgctacagaaacccacatgaggaagccgcttgtgctgcctgggggatgggaggagagttgtggttggggaaagccccctaggatgtcttagtcaggtcctgaagtatagtcagaagtttgctaagaaaagacacggggaaaagttgttttgggcaagagcatgaagacgtgaggacccggcgtatttagagaatggtgagagcactgggacccgggtgggcagtggcgggagaagcagctggaaggagaggctgagagtagatcctggaggcccatgagcgccctgctgggagctgcgactttcccagctgcctcagcagccgcctccctcacctctggactctggtcttcctcaggcgtcctcccgtcactctctggaagctggatacatagtaagtgctatccacctgtcctggcccctccctgctccaccctgggcctcttccctctcgtgacacctctgtctttccttctccccagtgtgacgcggaaagtgatctggacgagagggtgagtggggctagagcttgggtgggcagtgtcactgcttgtaaaagggactgcagcataaaggtcttctgcgtgcagcagacagccttcccttgagtgagaaacatggcttaggttgagtcaggattaggtttttgggaggaacgggggtggattgggagggtaaatggcgtcattttttcttttggtgactaggggttagctgaccaaggaatggagggtccatgctttggcatactatcctttccaaagcccttgagctacttctggttctccacggaaacccagagtggctgtggcactgagatgggccttcttcccatcttagaatgaagatctagattcaagtctgagcagagaccgcagatagagtagtgaggacactaaatcattgtagtcagtgtagggactcagcccataaaggtgtatttgagtttatccttaggggcgatttgcttgttgtgagatagtatgtcctagaagttaatgcgctacccattgggcccatgtaagtaactcaatttgcactccctgatgtgtgtcttgtttttgtttcaaaagttggctggataggactgtggtgaaccagagggttcttgtcaatttccgtcatccatctctatctgtctaggctgattgttgctacgagaacagggggcccattcttgaggcaatctgcaagcctgagttttaatgaggaatctccggattcttaaatatctgcagttggtttaaaacttttaccaacgctggtggaccaaataaatctgtaagcgagggaggcctgtgggccagcagctagtgacctctgacgttttggtttggtttgcctgcttctctgctgcttcaacgctgcctccatttagtcctcttggcctatcggattcttggggtcagctgctccactctgctttttctccaagctcagccccctagagcccagtctttgatggatctcagctaaactgaaggaacagacttgccactaccaccagttcctagcagcctccagaggctatttggccttcctgggtggaggcctggcccacccacaacctaactctatcccttgcccttcttccccaggtctccgatgatgacctc

SEQ ID NO: 97657 - DNA, 30429 bp, Homo sapiens
  misc_feature (1)...(30429): n = A,T,C or G
ttcccctcctttccttttatgctgggtttttaataatggttaactagtgcttggcataaagaactccaggaagtggccttgaaaaactaagcagggaatcaaggttgcagcatgtccagccctgggaagaatgctgagtgcctcctgtattcctgttgcacccgaaccagtgccagccagaccaccagatggcccactgctcaagactgtcaatgagaccagacacactgacccacctcgagtcaacctgtgcatagcttccatatatcccctctcataaccaccccctctcataaccaacccccaccggctgggcgcggtggttcatgcctgtaatccagcactttgagaggccgaagtggggggctgctggttgtaggggcatcacttgagctcaggagtttcaggccagcctagggaacatagcaagaccccatctctacaaaaaaaatcaaaaagtgagccaggttggtggcacgtgcctgtagttccagctatttcggaggctgacatgggaggatcgcttgagcctgggagatcaaggctgcagtgaactataactgtgccactgtactccagcctggataacagagtgagagcttgtctcaaaaaaacccagccagcctgaaaattttgagatgagactttcagacattagtctgccatctcctcggtttgctggctctccgaataaacctgctttcctcctaccaactctttttttttttttttttttgagacagagtctcattctgtcgcccagtctggagtgcagtggcatgatctcggctcactgcaacctccacctcccggattcaagcgattctcttgcctcagcacccccgagtagctggaattacagacgtgagccaccatgcccatctaatttttgtatttttagtagagacggtttcgccatgttggccaggctggtcttgaactcctgacctcaggtgatccacccatcctggcttcctaaagtgctgggattacaggcatgagccaccgtgctcagcccccaactctcgtctcgtgtttagcatttgggcagtgagcagctgagcctggatttggctatgctttccctctagcgtcaggagggccaagaaagacaccgtagttgaactttgatagaagagcaggaggtgggcttggggatgttagagggaagggagttccaggggacaagaatgacacgaggaaaggcatggagatataaaaatgcagggaataacgggataggagtagaaggtgcgtgggaataggtggcatgccctaaagtggaaagccaggttaggaaattggggctttaccccataagcaatgggaaaccagggaaattttctgatcaggggctggcctggttatatcaatgctttaaaaatttggccaggcacagtggctcacacctgtaatcccagcacttttgggaggccaaggcaggtggattgcttgaggtcaggagttcaagaccagcgtgggcaacatggtgaaaccctgtctctacaaaaaatacaaaaaaattagatgggtgagatggcacatgcctgtggtcccagctacttgggaggctgaagtgggaggatcgcttgaacctgggaggtggaggttgcagtgagtggagattgtgccactgcactccagcctgggtgacagagcaaggcgccatctcaaaaaaaaaaaaaaaaaaaaaagggtggggggcactgggtaggagactgcataggaagttccttcatgattcagatgactcactttgggtagcccataagtggtcatgaatgtaatgagcttgaaatcactgatcagtgagaggaattgccatatgtgtgtgcctgtgtccatctttagagctgcagacagatttgagtggtgcgccattcactcattcattcctataacacataattactgagcgcctaccatgtgccaggtgccgtggagccactggagaaccagcagtgaacacacaacagacaaaactccctgccttcacagtttgctttgttctttatgcctgggtaaaacgggtgcaggaatatgccatttattcattctgatttttttgtttgtttgtttttgagacagagtcttgctctgtctcccaggctggagtgcagtggcacgatcttggctcactccaacctccgcctcccaggttcaaccatacttgttgcctcagcccccagagtagctgggattacaggcacatgctaccacacctggctaatttttatatttttattttttatttttatgtatttatttatgtatttttgagatggagtttcgctcttattgcccaggctggagtgtaatggcatgatctcggcttactgcaacctccgcctcccaggttcaagcaattctcctgcctcagcctccctagtgcctgggattacaggcatgtgccactacgcctggctaatttcatatatttagtagagacagggtttctccacgttggtcaggctggtctcgaactccccacctcaggtgatccacctgcctcagcctcccaaagtgctaggattacaggcatgagccactgcgcccggcaggtcacatttgttttgggggcaatcacattaaggactggggaggaagacatatgtaaaggaaaggggctttgttcaagtgggaagaccagagagagaaggctgtgctgacggcccaggtgaaagacagtgagggcctagactgacctgaggtggtggggacaggagagggcctagagacggctctgggtgtcacagttgagagaggagctataagagcatgcttttacaagaatgggttgtgagccaggtgcagtggtgtgcccctgtagtcccagccactcaggaggatgaggtaggaagactgagcccaggagtttgagtccaggctgggcaacagagtaagaccccatctcttaaaaaagaagaagaagaagaagaagaaggagaaggagaaggaaaaaagaaagaagaaagagaaggaagaagaagaagaggaagaggaagaagaggaagaggaagaagaggaagaggaagaagaagaagaagaagaaaagaagaagaagaagaagaagaagaagaagaagaaagaagaggaagaggaagaggaagaagaagaagaagaagaagaagaagaagaagaagaagaagaagaagaagaagaagaagaagaaagaagaaaagaagaatgggctttgcaatcaaaagatacaaacaaggtcagacacagtggcttatgcctataataccagcacttgggaagccgaggtgagagcccaggaggctaggaccaatctcgtctctgcaaaaaaaagaaaaaaagaaagttaaattagggccaggcacagtggctcacacctgcagtcccagcactttgggaagccaaggcgggtggatcatttgaggtcaggagttccagaccagcctggccaacatggcgaaaccctgtctctactaaaaatataaaaattagccaggcatggtggcaggcacctgtaatcacagctacttgggaggttgaggcaggagaatcacttgaacccaggaggcggagattgcagtgagccaagatcgcgccattgcactccagcctgggtgacagagcgagactctctctcaaaaaaagaaagaaagaaagaaagaaaattagctggacacagtggtgtacacctgtagtcccagctactcaggaggctgagatgggaggattgcttgagcccaggaggtcaaggctgctgtgaggtgtgattgcaccactgcactccagcctggggaacagagtgagaccctgtctctggaaaaaaaaaaaaaaaagcaaacaagaccccagccctgccctttattaaccttgtgaacttggatatgttatgtgaccatgcaaagcctcagtgtccttgtctatacacttgggatcttagcagtggctactgtgaggttgggaggtttctgggagctaccagcatagtgaatgcaacacgttggatgcccagaacgtgctggcattataatggcggggaggcaaggacagctttctgtgctttgagtggctgggtggatggagatgacgccatctctgagggagaacacaggaaggaacactttggggacagccacctccttgaggtccccacgtcagcgctagccatgcccactgtagtcatggatctactcatggctctggtggcatcttcaatctctgtcttcttggtgcccagctcagagcttaggcatatagtaggggctgtcttacagggggaggatctggctcgcaggtacagatgtgggcactgcagacacggaggtgcagaaagatgcaggtaaagaaggaagagaatgccaggcatggtggcccaggcctgtaatctcagcactttgggaggctgaggcaggaggatcgcttgaccctaggagttcaaaaccagcctggacaacatagtgagaccctgtctctacaaaaaataaaattagccaggtgtggtggcgcgtgcctgtagtcccagctactcaggaggctgaggtgggaggatcacttgagcctgggacgttgaggctgcagtgagccgagattgcaccactgtactctagcctgggcaacagaatgagaccctaactcaaaaaaaaaaaaaaagagagaatggacggagcccagggaaccctgaggttgaagggctgtgggaaaaaaggtaaggacctggaaagaggctgggagacaacactcacagatcaggttggggggtaggtgggcggagcaccacagacaggagggtttcaggaagaggggctcatcagggtcacatgctgctgagaggtcagggatggtaaggcccgactggcggtgtgggatgagggtttatcagacacagatttggcaccaaggaggtcactgggtacctggcaagagaatgccgggtgcggtggcccaggcatggaatcccagcactttgggaggctgaggcaggaggatcgattgagagtcaagacctgtcccattggggaccggcgccccattgcagggggtgggaggagctggtgtggtgtaaggatggggagaggagaggtgggcatcagaacaggaggtcactcagaccctcaggggcacctgatttcccctcccactaaggacaaatttcatgttcaacagtcagagccatctgcagatgggccaagaggtcctgggaggtagtgagcaccctgtccctggaggcagacaagcagagctccgagacccaccgcggcgggagaggcccaggctgtgcaacacaagccccgtgtccttctcagcaagcacctggctggttccctgcatcgtaaaaaccacacagagggtcggtctttctatttatagtgtccaaagagcctcctgcaagaacacacatgggctcgcacccagaggtggtcggcgcgcagcctcacgcagacaccagacacaaaacacagccgcgatctgtgtctcctggaaagggatccacatcctggctcccaggttattccctgaattcattccgtcaccccctctttccgccgggccaccccaccccccgggccaccctagcatctccgcttggctctccgcatctctccctgctcctcgggctctgcccacccccacccgcctgcaggcctctcccgnnnnnnnnnnnnnnnnnnnnnnnnnnnnnnnnnnnnnnnnnnnnnnnnnnnnnnnnnnnnnnnnnnnnnnnnnnnnnnnnnnnnnnnnnnnnnnnnnnnnnnnnnnnnnnnnnnnnnnnnnnnnnnnnnnnnnnnnnnnnnnnnnnnnnnnnnnnnnnnnnnnnnnnnnnnnnnnnnnnnnnnnnnnnnnnnnnnnnnnnnnnnnnnnnnnnnnnnnnnnnnnnnnnnnnnnnnnnnnnnnnnnnnnnnnnnnnnnnnnnnnnnnnnnnnnnnnnnnnnnnnnnnnnnnnnnnnnnnnnnnnnnnnnnnnnnnnnnnnnnnnnnnnnnnnnnnnnnnnnnnnnnnnnnnnnnnnnnnnnnnnnnnnnnnnnnntcggagaccccggagcagcagcagaggcaggagtactaggaggaggaggaggagccgtcgcacgatgaaggatcggactcaagagctgcggagtgtgagcttgggggtggggagaatgggggggcgggaccccaatattgggggagcgcgtggggatggagtgggggaggtgctgggacgtgggggcgaaggatgagatcggaggttggtagccggagcaccccagtatcttcaggcgcctgatgtctctccagtgaacctgcattttggggacagtgcctggaaggggttggaggccatgaagacacaagggggcaggagaggtctcaggggcctcgaacaccccgcattcccaggagggccccggggtctggtctggggatgggagagagtggatatcaggagaaaccggaggagactgtcatcccctgggcaggtttgccaaagagaagcatgggggcggtgactgggccaggctgagagtctagcaggacccagattcaggggatgctacggggaaggacacaggttgggactgagatgccagcacctggcagtgaatgaagtgtgtgtgtgtgtgcacacgcgtgtgtcactccctatagggagggggcatctctccgagacagggagggaagaggtggcctccggagagagccagagggccagggcctgagacagggtgacccagaggtgggagatgrggatgcagaggagagggccatggaacacgggccgtgctctgcttgggggaactggggcaccccgggcagtcaagggctgatgcaggccccaggtctgcaggcctgaagaggcccggctccaagagtctggccaggcagtccctggttttggggggacaggggaaggactgcagtggaggctgctacctggaggaactggggagtggggttcgatgagaatggtttcaggggcagggaggacgctggggcatttggagaaatgacctggggcccgaggaggcagcactgacagtccgcactgtgctgggctggtggtgttatgttaataagggtaccggccccggctgagctgcccaatgcactgagcctttacagggaactggtgggttgttaccccaggggttattaccccacttgacagatgaggaaactgagattcaggcgtgggaagggacttgtccaaggtcaccaagcaagtgggtggggggcagactgcaatctgggtttcctgtctgctaggttgacacaggtctctgcttttctggcctttgaaacagaagtttcagcactgggggtgaagagctgtcccctggatttgggggtggggacccaggttacagacagacgagaagaaggtgtttggaggcaagtgaccgctgtctctggggacagacaggttgccaaatgggaagcaaggaggagctggtggctgagggagggaattttaaaggtttctttattacatttttactgaatatacactcaggcatgaggaaagtgacagtaataataaacattgtttgaagtgttttatgcatattcactcattttgatcctcacagcaatcctatgagactggttatctcatttcatagatatataaatatctttttagatatatagatatatgttatctcattttatagataaggacactaagctcagagaggttaagtaattagaccaaagtcacacagctggtaaaggcaggattcaaacccaggcaggccggcttcagcatcggtgctgtcaattcccctcctcagtttgcagagcaggctttcatccgtgatgtcattagagccccactgacctcctggcaagtggacggggaggctctttcattttagagttggggaaactgaggcccagagtggttgaataactttccaaaggtcacacagctagcaggtgagggatccggacttgaacccagttcccctgctaccaggactattccatgactccaaaacccagggaaatggaagtgggttgggatcaggtggtgtggaattggggtacaattcgagaaagagggagggaaaaggctaagcggggtaagggggaggcaggggagggggaggcctcatgaatgagtcaggggcccctgctcagaggtaaggaatcctgttggctgtggctgccggaggtggtgtggaagggtgaaggggctgagtggatgtggtggctttggtattagtcacagctcagggaaactggagattcaagagggggcgggcggggtgggaaaagctgacagattcaggtagcgtaagggtctccctgctacagttgaaagcaaggagcctgggatgcaggagacacctggcagggtgtgggggacctggaaacggggtctctgagacactgggagggatgaggcaggggcggtggtgggaggggacattagcccaggggactgattgtctttccaacagtaccttggcattcccaaggggttctcaagtccgtttgtcacacagtggtttcgggagccagactgtctgggttcaaattctaattttgctacttcctgtgagaccttgggcaagttgcttaacctctctggtcctcaatttcttcgcgtatgagttgggagaagtaagagtgcctgtttcacagggttgtcctgaggactggaagtagttaatatgcatcaggtgcctaggagggggcctggcgcccagcagtgctgtgtgtctgttacccagcagatggcttgtttatttctcttcaacaccacacaagccccctgcgatgggcaggacatggcccctattttattttggagtacattgagggccagagggggtaaaaaaaacctgacttgtccaaggtcagatagcttttaatggttgaggtgggcttgaaccagggttttctgcgtccagtttaccaggcaaccttggttggtgctaggctggttgtggaggctgtgaaaaggagttaatcagctaaataggtgtcccagggtctaaggagtgaagccagagtggggctccagaggaaagagcagagtgagtgaggtggagaggaaggtgggttatgggagaagacaggaggggcacagggagggctgaggtctgagacgcagctgtggagtcgggtgggagaagtgcggagacaccctgggaggaaggtggggcctgcactgcaggagcctgaatctgaggctggacaggatgaaggctgctgagggaccgccccgtgccccaaaggccctcaggtatgaggcaggcacagtaggtgctttagaaacgcagccctgaaatcacagggtgcagagaccaacgaaccctgggtgatggatccatatcctccagctgctctgggctgcctttatttatatttaaaaaaatgtttttagagacatggtcttcctctgtcacctaggctggagtgcagcggtgcaatcacagctcactgcagccttgacctcctggtctccagggatcctcctgccacagcctctcgagtagctgggattacagatgcgcaccaccatgcctggctaattctttttgcttttgtagagatggggtctatgttgaccagactggtcttgaactcctggcctcaaatgatcctcccgccacgccctcccaaagtgctggtattccaggcatgagccaccgcgctcggctggcactgggcttctttctgctatccaaacacacaagtttacccctgtccaaggaccttcgcgcatgctgttccctctgcccagcatgctgttccctctgccctgaattctgtttccccagcactgtggcacagttggctccttcaggacctagctcagatgtcacctccccagaaaagccctgctaactgtcctgtagaaatccttccacaatcccccccaattcccatgtctctcaattccatctttctgcttatctccctcctgctattcagcacaatctgaaatggtcttgttcacctcccattgtctgcctcccccactggaatgccagctccctggaggcaggccctcctcgcctgtcttcttcaccaccacatcgccagcagcacccagaagagtacctggcacaaatcagacacatccgttagatgaatgaatgactccatgaagcagagggaggatgagaaaggggcagggggtaaggcaggaaagatggaggagagaggtcagggtgagagggccaggctgctcagggggagggagcaaggagaggccccagccagggagacagatggactgaagcagagggtgggggaargggcgcagggggaggctgctgcctccgatcaaacgatgatgcttgcacccctgaggagcatgggaagcccgtgtgtgtcagtgctggggcacgcatatgtttacacacacacacgtacacacacgcacactctctctgacttttctgtcacccaattccagtctcttgccgcctctgtgtttttgtcaccgtctcaccatctgtctctctggtcactgacttgctggctctcactgtcactctcctccttccgcttctgtatctgtccttgccgtcgctccacatcgacatacacacaaggcccgtggtggctctggtgtggaagacctggacttagggggcccctgaggaggtcaggctgcagctggaggcttggatctgatgtgcgcagtccccaggtgcttctggaaggggctcaggggcactgcactctctcattcaatccctctcaagtgctcaaggagctgtgcgctgtagagcagagtgcctgagtttgagtcatcccatcagctgtgtgatcttgggcaagttacccaatctctctgcgcctccacctcctcatctgtccagtgagaataagaatrtgacctcatggagtggtcgtgaggattaaacaagagatgcaggctgggtgcagtggctcacacctgtcatcccagcgctttgggaggccaaggagagaggatctcttgagcccaggagttcgagaccagcctgggcaatatagtgagatcccatctctcaaaaaaaaaaaaaaaaaaaaggaaaaagaaaaaaaaagaaatgcaaagcacttgtaataggacccaactcgtggtaatcagcacatatatgttacatcctcgatttgcacatgaggcaactgaggcttgaatcgttcacctgtaacctgaggccaccataaagtagactggggcacatttgatcatcttttcctaggtagtctggtttgcccacagcctgctttctttttggctggcctaacttcttccagaaatggatgctgtactcattactaaatatgcatcactcagagcacggagggcccttcagagcagggtgggcacttgcaccagtctgctcatttcagtgatgagggaactggggcccagggaggagtctaagtttgcctggggtcacacagcaagacagacggaggctgggagggctggcctcctgtccaagctcttcctgcagccctgggcccctcctactgattttctgtcctggctgcaggagttcagcagtcctgaggacatggcagagtgggctttttaggaccaggagggactgccatctgtcagcaggacagaagggagagagcctgacatttagtgccagacagtcctgggttcaggtcctacctctggcctcatttgctgtgaagctttaggcaggtcaggcaacctctctgagcctgtttccttgtctgtaacatggaatcagccggtggtaggcattgttaccactcagcaaatgcagagactaggctcaggggtagagccaaatggtcttctaacagctgacctggggcaagttctttttttttttttttaagaaacggggtcttgctctgtcacccaggctggagtgcagtggcacaatcacagctcactgcagtctcttgacctcctgagctccggggatcctcctacctcaccctcccaagtagctgagactacaggtgcgcaccaccatgcccagctaatttttgtattttttgtagagacatgatcttgctatgttgcccaggctggtcttgaactcctgggttcaagtgatcctcccaccagagcctcccaaagtgctgggattacaggygtgagccactacaactggcctgagttatttagctctatgcctcagtttccccatctataaaagggggctataataatacctccaaggggactgttgtaagaatgaaatggatagatatatgtggagcacatagaacagtgcctggcacattgtaaaacatcatctaaatatttgcataagtataattatgttggccaatggtccttacagagtcctaatgaagattaaatgagataacaagaatgtaagacttacgcaaaaaataccatcaagtgctcttgttttgctaggttgtccggacacagagccttccccagattgggacttagcaggcgctcactgagagggaaagtaactgggagcggaaagtcagtgggggaggtagcccagtctggagcctaacagcggtctttgaggggctggatgcccatggttttctggccctatgtggcctgggtgcccttgggcaagtcactctccttttacccccctggcttcctgttccctcatctgtgaaatggggacgatgatgtttatgcagcttttctctcagggctggtggtgctgaggatcaaaacggattatggatgtaaaagtgtttgtaaatggtagaggattattagctcccagctctctttgtatttattataccaaataaaccacacttgggccttctatcattcttcctgtcttgagggcaaacaaataggtagcccagggtgctccagagatgaacctaagggaggtggctccaagaacaacaggagagattgaaattagattttaggaaagacttcctaacattagcatggggaagggagagacacagagaacaggaaagtcctcaggcacccgggccagggagaggccgcatgacctgcgtgaggctggtggctgagtgagtggttgaagggagagaaagggcagaggaaggcttttggctctaggggaaggaggccttgtagcacagctggattttgaggacagagaaagtgaagagcatcatggtaggccgatgggtcctcagaggtgagcccagcatcccagagcctctcagggtccccaacttatgccacctgtgccgccccactttctgggggcagctgtgagccaagacagaggaaactccctttccaggcggatggttgggattgtctggaaattcaacacaagtgctgaacacattttccgacacagtgtgggcccagcgtctgtgtgaagactccctggagttccatttgggctgggcttagcagggaggctggggtggctcaggagcgtggagctggaggccccccaggctgtgctggcttttcctggggctgtggggcactgctgatcctgagttttggctgtgtggactgcacctaggtcccatctggccctgtctaggttcaatctgagctgtctgggatctgtctgggatccgtgtgagcctcggctagttcagtctgagcctgtctggtttctgttaggccctgtctgcgttccgctgggaccctggcaagctcttctttttggattccaactgagtacacccccaggtggatgctatttggatcctgtcttgatttcacccaggctctggggtttggattctgtctgagctctggctgggttctttttggaaatcagaatgaactctgtatacatttccactggggctgatcagggctccagatgtcattaagcttgatggactcagattttgctgtcagacctctgtcccaagcagagaaggactcaggtgtgtgtagcacagggcacctcccctacagcctctcctgtccagctctgagtgtgtgtgcagacatgaggctcggagaagctggaagaacaagcccagtgagccctcccaaatgtcctcaggggtgcagctgaaagccagtgtgtccacacatgtcagtgcggctcagctgtgagtctgcgtgcgggtgaacgccagcatcagtgcatctccgtgtgggtgtcggggggcctattcctgtgtgccttgggtgtcagctcttctgtctgtgtctcgagtctgtctgtcggtggcagtggtgctgtgggtgggtaaatctctttgtgtctctgagccctgcgggtggagggttgagcagctgcaggttgcaactgggaaatccaagccagcaagagtaggtgggtgtgaagttggaaggggctggatgaaagcaagtgaatccactgcgagggagagccggctgggaggggagggagagtgggcgggaagaggggggcacagggcgcgagggaggtcggggtgctgcccgtatctcttatccagccctcactgcttgctcaacttggcgcctgccgctggcagtgaagtgaccttgcacaggggacatgtctggtcaggtggggcaggagaggaagagaaggagtaaagtgagatctgggcaggagagcaggaacagtagggagatccaggctcccgggactctagtccaggacccttcatggagcccagggtcagttactgcaagcctgacgttgagccgttgttgaaatattgaaatcatccctattggctggtcaaggctggctctgcgcccccaaggccacatccaccctgagagggggtctttttccaattccttctaaggaatcctttgggctgacaaacacttttggtgcctttgccatctaccctgcatgggacccctcccaggacccctcctctgagcctagagctgggagcacctgtgtgtgcatagcagggagagggtgggagagctggagagccagccttggggacccaggtagggcctgctcatggactcagccttccttgtccccaggcgaaagacagtgatgatgaagaggaggtggtccacgtggatcgggaccacttcatggatgagttctttgaacaggtaatgggcctccaaggcccccagccccagccccagccccagcacccagccccagcccctagtcccactgcccagcctcagccccggcacccagccccagccccagcacccagccccagcccctagtcccaccgcccagccgcagccccggcacccagcccctagccaccgacaacttccttttccctgtcccccacttccctgctcctgcaccctccctggccttttatcagccgttctggggctggtccattcccctgaaccctggctggttcccctggaacccgttgtttggcctgacagcttggctgggtatagccgattttctgctccaggtggaagagatccggggctgcattgagaaactgtcggaggatgtggagcaggtgaaaaaacagcatagcgccatcctggccgcacccaacccagatgagagtgagtgtggctgccggtgactgtggggtgggaggagaaggggcctggggttcccacccagacatctcacttgccctcgccctcccctcagagaccaaacaggagctggaggatctcactgcagacatcaagaagacggccaacaaggttcggtccaaattgaaaggtgaggagtacaatccctcaaccaggaaggaaaagaattgtgggtggagcatggtggctcaggcctttgggagggcgaggcggggccaattgctcaatcccaggagttcaacaccagcctgggcaacatggcaaaactctgtctctacaaaaaatacaaaaattagctgggccagtttgggaggccgaggcgggtgaatcacgaggtccggagttcaagaccagcctggccaagatggtgaaaccccatctctactaaaagcacaaaaattagctgggtgtggtggcgggcgcctgtaatcccagctactcaggaggctgaggcagagaattgcttgaacccgggaggtggaggttacagtgagctgagatcgcgccactgcactacagtctgggtgacagagagagactctgtttcaaaaaaaaaacattagctgggcatggtagtacgtgcctctgttccaactacttgggaggctgaggcacaagaatcgcttgagcccagggggtcgaggctgcagtgagccgagatcatgctgctgtactccagcctgggttacagatagagaccctgtctcaaacaaaaaaaaaaaaacaaaaaacaaacaaacaaaaaaaaagggactgggcgtggtagctcatgcctataatcccagaactttgggaggccaaggtgggtggatcacctgaggttaggagttcaaaatcctaaccaaatcctggccaaaatggtgaaaccccatctgtactaaaaatacaaaaattatccgggcatggtggcaggcgcctgtaatcccagccacttgggaggctgaggcaggggaatcacttgaacccgggaggcagaggttgcagtgagccgagatcgcgccactgcactccagcctgggtgacagagcaagactctttctcaaaaaaaaaaaaaaagaactttgccatccattgagcaaaacaggcctttctctaaggaatttctacaaagttccaggagccagattattaaacagtcagaaagcacaaaaccccagctttcccccttgctccagttctttggagaaagatataygataggaaatgagggaaaggagactgtctaaattgcatctgagccctgctggttccaccagcatgaaggttcaccagaaaaaggtgatcttccgagtggcttcgatttcattaagtcctcatctctcctgagcaggcccccggcatggcacagagcacccagtgggtgggcccagcaaatgcctctgaatcggtatccttggctcaggacagattggacttgtgtggctgacatcaggggctggcgagctttcaagagggacttgccaaatgttcatttattcactctaatttaaggacttgggtgctggtaataaccaccttcccccaaagcaccgtgggttgggaacctccttgtctgctcataccagggaaatagcagtgttactggcatgctgttttgcatgctcctggtaagtcagtatcagaaaacatatgctgagcacctccaatgtccgaggcacattgctaggctttggggaagaggagctatatcagctacctggcctggagaacactgaccttggcccagagagagaagggtagtaactccatgccctctggactggaggggaggccatatgtgagcctcagatgtggatttgtaaaaacaagccctttgtactcaggagagtctgctggatggaaactgtctgaatctgggagcatgttaagtgcaaatccaggcagacagagtccaacctccaccatcagctcaccctggacaagtcccctactctcagcttccttatcagtacagtaagacaaatgaaagcaatttcaaaattagcttgttttgggggtggggggtggagggcatcaaaatacttttttttccaaagtcatacaaagaatcccaatatataaaacataaaagtcaggttgttctagctgagctggagctgggagcacctacctgcctgacctctcttcattctctgcaacagcccctgaaattccttctcagaaacaaggttcctgctggcagtttaaaatcccctgggctcaatggtttctctaggtccatcaagccttgaccttgaacactctctgtaagaccctggggagggctctgtgggtgaggggttcaggaatagaccaagaaagaagctggaaaagtggccgtggtttagagaagctgacctttcagacctccaggaaaggagagaggattctcttagtcctcttccagctggtggcatgagctcaggctttgggtgtgaccttgagtgagtggttttgcccactggaaactgagtttctagtctaaaacatgagctgatatcactgaactcccaggaatgttgtaaaaagtcaatgagatcctgtaagagacccctccctccggacttgaccccagccccaaggctgacagtcgggccccaatctgggccagccgattccaatatccctgggccatgtgttgctgagccagagctgtcactcaatcgggggagccttggggtgccatccggccccgtacctcccccactgccaacagaacggaggagtgaggctcttaggaatggcctggaggctggtgaggtctgagagggccggtgattcatccctgctgcattttctgatctcaccgaagtagattttgccacaatctcttttttagaaaatcggaacgatagtgtcaggagtgcttgatccagaagcaggaatctcagttaatctgtgcacttttccagaacgtccttcagaagtgggaattcccggatcggggatcaccttacagggcagggagagggctgctttctcccttggaatatccatgtgtttgcccttgaattcccctgggaaagaggggccactagaacctgatccacctggaggtgactgccttccatcagaaaaaaggcaggctgtgttcttgccccctgtccagaggctgtaggaagtagggagcaccccacatacatggccccttcacgcgggctgggccggcacgccctcatggagttggacaggaattaccactgatgggactttccaagacccagttctgccactagaacaaatagcccccttctgtctggtgaccctctgaccctcagtatcccttcctgcctgccttcggaaccccctcaaacgtctgttcgtctgtttatctgctggctcctaacaccaccctggggcaccgctgcccgcaactcgccctggggatgacgtttctccccgggcctggcgctgccgcggggtgttgaccattcrtacgccccggaccctcgccccatgtgccccgggtctcccgcccatcgctgcgccctctctcccgcagcgatcgagcaaagcattgaacaggaggaggggctgaaccgttcctccgcggacctgcgcatccgcaagacccaggtaggaggcggcagcccattgggggtcgggtcgggacccagctcgggaggagcccaggctggaggccggcgggccagggccaagcaccggcgggggcgtggtcagggagggctggggcggggctctgggggcgaggctagagcgggcggggccctgggcggggctctcggggagggcggggtcgagccgcatctcagcgcagtagcagtgtctctagctggtgttggcctaagatgggggtgccgggcgggtagggaaccatgaacttgtcagggtttgggatcgcggccagagctgaagaagggaccgtaaactaattcagcgcttcctccttattccgcccatgcactgcctcctcacctgcctcggtctctgctccctgactccctccctgatccctgactacctccctgatccgtctgtccccccacccccaccgtagcactccacactgtcccggaagttcgtggaggtaatgaccgaatataacgcgacccagtccaagtaccgggaccgctgcaaggaccggatccagcggcaactggagatcagtgcgtgtgccccccaccccaggaccccgaactccttgaggctgcccaagcccccttccaggcatttcctctctggagggggcccctggcttaaggcggcgtgggagggtgggccccaggtccccgccccatcaccccacctcaggcccccaggctgtcccagcccccgagcagggagtcctttcttcccgcagctggaaggaccaccaccaacgaagaactggaagacatgctggagagcgggaagctggccatcttcacagatgacgtgagccgcgggtggggcgggctctgcttttggaaaatttttgcctcccctccctaagttcaggttgaactaaggtcctaagtccaccctggaaaaatgagcagcgggaagcctgagccgggaactggggaattccatgggagcggagcaggaaggcacccccatcagatgacggagtcgttcgtgtgccaggcactgttctaagcactttccatcttcacattcacccaccaactcatttaatactcacacatccccttcgaggaaaccccatttcacagatgaggaaaactggcccagagagatgaaatcacttggcaagatctcagagcgagggagagggccaggacttgaatcctgtctagtttcagagtcagaactctcgagccctaggatacacgacatactctgctactgaagcaagtcgtttcaccagagaactgatttgcctacattaaaagaaattttttttaattaaaaaaaactttttttcttttttttttcttcaagacggagttttgctcttgtcacccatgctggagtacagtggcgagatttcagctcactgcaacctccgcctcctgtgttcaagcgattctcctgccccagcctcccgagtagctgggattacaggcgcccaccactcggcctaaaaaaacctttttttgtagagatggggggtcttcctctgttgcccaggctggtctcaaacttctgggctcgaataatctgcctgcctcagcctcccaaagtgctgggattacagacgtgaaccaccgaatccagcctaatttgcctacattttgaatattttttttaaaacaagttttagttttgcttaggttttgtcccctgtgctgcccttgtccttttacatatgaaaggatgggctggccgggcccagtggctcatgcctgtaatcccagcactttgggaggccaaggcaggtagatcacctgaggtcaggagttcgagaccagcctggccaacatggcaaaactctgtctctattaaaaatacaaaaattagccrggcatggtggcacgtgcctgtaatcccagctactagggggctgaggcaggaggatcacttgaacctgggaggcggaggttgcagtgagccgagatcttgccactgcactccggcctgggcaacagactgacactctgtctcttaaaaaaaaaaaaaagaaagaaaggatgggctttccccgaacctagttcttgtttctctcagtggacttttgccccggcctgcccactcctgtctccgtttctgtttctggtggcaaaatgactctggttaagggttctagaccaggtttaaaggatgcgctatgactgtcttaaaagttttcagctcattgttatttggagaactgatctttgttgaaaacgcattgagcagcccggtgtggtggctcacatctgtaatcccagcattttgggaggccaaggaggatggagggcttgagcccaggagttcgtagaccagcccgggcaacaaagtgagacccccatctctacaaaaaaaatgtttttttgatttaaaaaacaatttcttttaatgtaggcaaatcagttctatggtgaaacctgctttaattagccaggcatggtggcgtgtgcctgtggtcccagctactcgggaggctaaggtggaaggattgcctgagtacaggaggtcaaggccgcagtgagctatgatagcaccatagcaccactgcactccagcctaggtgacagagcaagaacttgtctcaacaaagaacaaaaaccaaaaaaaaaaaaaaagacggggagactgaacactgtccaaacagccattgtatgatttcggcttatagaatggtcataggatgagcaggagatgaggggagagggagtctgggccttgactgctgaagggaaggtgtggagccttgggtagtggggagccatggcaggctgtagagcagaggagtggctcaatgtggtaagaacagtgagtaatttgggaagtgagtcacctggctgaggctgggtgtttgtggagaggaggcatatctgactgtgggtcacggtctcttccccactggctttctttttttttttttttcagcatggtctcactctgtggcccatgttggagtgaagtgaagcaatcatagctcactgcagcctcgacctcctggggtcaggcaatccttctgcctcagtttcctgagtagctgggaccacaggcgccaccatgcccagctaatttccttttttttttttttttttttgatagaaacaaagtctcactatgttgcccaggctggcctcaaattcctgggctcaagtgatcctcctgccttggcctcccagagtactggggttacaggcctctccctactgactctttttttttttttgagacggagtctcgctctgtggctcaggctggagtgcagtggcgcaatctcggctcactgcaagctccgcctcccgggttcacgccattctcctgcctcagactcccaagttgctgaaactacaggcgcccaccaccacacccggctaattttttgtatttttagtagagacggagtttcaccgcattagccaggatagtcttggtctgctgacctcgtgatccgcccgcttcagcctcccaaagttctgggattacaggcatgagctacctactgtgcccagccctgactctttttttttttttgagatggaatttcactcttgttgcccaggctggagtgcagtggcgtgatctcagctcactgcaacctctgcccccccgggttcaagcaattctcctgcctcagcctcctgagtagctatgattacaggtgcccaccaccacaccaggctaatttttatatttttagtagagacgaggtttcgccatgttggccaggctggtctcaaacttctgacctcaggtgatctacacacctcccaaagtgctgggattacaggtgtgagccatcgtgcctgaccaatgtgtacatattaactcactcagtcttcacaaccaccctgtgaggtgggcagtgttatgatccacattttctaggtggggaaactgaggccaagagcaggtaaataatgtgcctaaggtttcagctagtaaatgacaccggatttgaccctggccactccactgcggtggaggcgctcatggcggagaagggtgattgtagctctctccctcgtcrccctagatcaaaatggactcacagatgacgaagcaggcgctgaatgagattgagacgaggcacaatgagatcatcaarctggagaccagcatccgcgagctgcacgatatgtttgtggacatggccatgctcgtagagagccaggtactggctctgccacccatgccactctgggagcctccctgggcctgaggtcccctcttccagcccagcccccatccctccctgtgcatgtctcctctgtctgcagggagagatgattgaccgcatcgagtacaacgtggaacattctgtggactacgtggagcgagctgtgtctgacaccaagaaagcagtgaaatatcagagcaaggcccggagggtgagcggggcaggcggcctgggggtaggcgggggagcccaaggctgagcccgggctgaggtgagtgatggcagcgggcgggaggccttatctctggctctgacctcttcctgtttctgttttctctcccctcttctccctgccaccctctgccctgtctgtccctgcatctgtccgtgtgtcgatctctctcactgtctgcctgtctcactcctctttctgctgcagaagaaaatcatgatcatcatttgctgtgtggtgctgggggtggtcttggcgtcatccattggggggacgctgggcttgtaggccccccccacccttctctctcccagacccttcccccaccacatcgggagcaatacccccaccacccctttcactccatcccctgctccaggctcactcccaaaacagacccaggcagccccacccctcctccacccccacggcagaccctggtgtccctggacctcaccgggccatggacccccccccgtccccgcacgtagatcgcagcaggcgtgattacacatgcacaccaacatgcatgccgccggcacatgctcgagacgtgtggacaccccagcgtgcgtgtgcgtgtgatgtgtgtgatgcaccagagcaccccctccacccccaccttgggtgtgtgtgcgtggtctgagcttcccccttcaccggggctgttgtgtagactgcagccaagtgtaacacagcagtccatcacgccctctctgtcctctgtgaacagtgtgtgtgcgtgcgtgagaccacagatctgtggacacaccatttgtgtacgtggaattttgtgtttcagtgtttgaacctaatgcaacagcaacaaagccactgatacctgagccctttgtgtctgctacaaaccaggcaggtggtgtgtgtggactcacactcacattctcagaggatccagggaggcccaggtacacacaggccatggcagacaccccatgtctttgttaccccaggggctgtggcatgtcccaggagggtgtgcatgtgtgtgtgtgtgtgtgtgtgtgtgtgtccaggatgtgcctgaagtattgataggtcttctcagatagagccctccacactgtggactggacacctgttttgggagggcacagaaatgtgtatttcttgctacctagaatgcagctgtgtgtgtgtggcgtgcgtgtgtatgcacgtgtgtgtgtgtgttaggggctctctacatggtgtgctttttaatttttttttgttttttgttttttgtttttttcgagacggagtcttgctctgtcacccaggctggagtgcagtggcgcaatctcagctcactgcaacctgtgcctccctgacgcaagcgattctcatgcctcagcctcccaagtagctgggactacaggcgcctgccaccacgcctggctaattttagaattttagtagagatgaggttttgacatgttggccaggctggtctcgaactcctgacctcaggtgatccgcccactttggcctccctaagtgctggcattacaggcctgagccaccacgcctggcctacatgatgtgtttctgtcctgcctgacctacatggtgtgtttctgccctgcgtattacacacacacacacacacatgtgcgtgcacacacacttctaaggacgtggccccatctggctttgtctctccagttgtccttgccctgcccccctccccagaggtgctgcccagtgctggtgtggccacacacggctacatcattgtgcaggcagagctccctgcctgcccagcctcagggctctgcatgctcacacctagatcctcatcttcctccatgtctctgcccagcatagccccgagcccctggaagctggtaccctcannnnnnnnnnnnnnnnnnnnnnnnnnnnnnnnnnnnnnnnnnnnnnnnnnnnnnnnnnnnnnnnnnnnnnnnnnnnnnnnnnnnnnnnnnnnnnnnnnnnnnnnnnnnnnnnnnnnnnnnnnnnnnnnnnnnnnnnnnnnnnnnnnnnnnnnnnnccaggcaggggccataccaggcacaaaccatgcacgctggcatgggtgcggggatcacacgaatgcctcctggaaggaaagggctacttgtaggaatgttactgatgaggcaagatgccaaggacttccctgcagggatcaaagatcaggacacgaccccttcctcacacacccacctcagacctgggagaggactgtgtgtcccccactgccccatcggatgctctgggctctgcctcagggaactcgggtttggggaaatgtctatttcagaagtactggagtggccagtgtggcagtggccactcagggtgggctgggtcctgagacccatccccgacacctctcctgctgaaccctcaggctgctccccacaccagggtgtgactgaggggtacacaggcctggatttctggtgtgaggaaggggctagcacctcccctgttgtgtagccagcacaggcacaatttgtgggtttggtggcaggtaggtggtgcgtgggagaaaggacagtgttagaggtccccactccgtggtctaggatcatgaaaggtgaacacacaagtacacaaatgtgccatgccctggcatggggcttatgtgtgcacaggcaaggcactcggtgtgtgtgtgcggaccccagggtcccaggtcatgtgaagcgtacgtgtgtgtgcattgtatgtgtgtgtacattgtgtgtgcattgtgtgtgcatgtggccaaacagatgtgacctcccagaacacagtacccctccacctctacccgagctcagacagccgagctctcccttgtcctgtgtgtgtgtcagtgtggccacgtgcgtaaccccaggtgggctgtcctgagctgggggcctgcctgtcccttcccagaacgcccctctgcaggacaggaagtctgccccaagtctggccacggccctcctgctcccatctcgggctgcttgggagacatcagagcaggccccagcccccagtcccctcttccggccgcctggacaggacccccattcagcccaggtgtttccggaagtcccacggccttggggccacaggagaagggttgaagcgtggctggggcaccactccccccacctggagtggcattgggcccacagctgcccatctctgggcctcaggtggaccaggggatctctaagggtctgctgtgccctttctatgcgtcctccacatcctatgatgtgcctgcttgttggctgctgtctgtgtgcgtcctggcatgttgtctggaggctggtgtcttttgcatgttcttggacaaatgtgtgctacctgcccaggcgcctgcaaccattgagcccacatgtgccccacgtgtgccctgcgggtggtcccgggcctggccagggctcagtgctcctcttccccctcctccctgttcccacccctcatgaagcacatgcgtgtccatcccatgtacccgtgggtcgacgcacgctcttgccacgccctgagcgtgtacacatgatgtgttctatgcattcaccctgccccccagcccgccctgcagaggacaagatgggtggccccggctccctttcccctaaccgcccctgcccgctgtgcagccgtgtgcgttggcgtgtgtttctgtgtcactggcgtgtcacgtgatgtagccgtgtttgctgacatgagcccctgcccccttctctgtttctccgttggtttctagagctctctccctccccttctcagaggggacaggactcctggggcctggctggggcccagagccaggccgccctctcctgttagccctcagagtcccatttctgttagccctcagagtcccatttctattggtgaccaacttgcaaatggataaaacacaggaaaatcctgccccccccttcctccctgcatgtcctgtccccagagccccccaccccaccctgggccaggtcaggccctgtgggacgggagaaatagcaaccaatccaacagcgggtgtgccgtgtgctcacttccttctgtccccacgtgggatgggcgccgtggggaggcggacatggggtggggggatgggagggagagctggacagacagatggacacggtcgtggatgaggcttttaatccggggtcagccaggtacagcattggggacatccccaggcccagggctggcgatgtgctgggaaggaacttaggtagagaggtgggaagtgaaagcatagggaggccatagccctccagaggggaattctaagacagacagttgaaggtgaggcctttgaaaaacaatgggaacatcacctcccaaagagggactgaggtggctggaggaaccagagccgcctctgcactctgcaccgagggtcgcgtgtggctgtcaggagagcagcgtaagcctgtggagcctctgctcgcttcctgctcagaaagccagaagagagctggggcaggccaccagggcaccagacactcaccaagcggccatcaggactgggatgagaggacagaggaaggacactctgtccccaaaccctcccgtgtcctgacggccctagaacttggaggtgtcaggacacaacacagactcaaggctcctggattgaaaatgtggagggcttgggccaggcgcggtggctcacacttgtagttccagcgttttgggaggcccacgtgggaagatcacttgagcccaggagttcaagaccagcctgagcaatatagtgagaccctgtctctaaaaacaacaaaaaaaagccaggtgtggtggcgtgcacctgtggtcccagctgttcaggaggctgaggcaggaggattgcttgaacccaggaggttgagggtgcagtgagctatgatcacaccactgcactccagtctgggtgacagagcaagaccctgtctcaaaaaagaaaaagaaaatgtggagggctctacgacaaggacagccattctggccccagagccctgcctcctgctctggaatgcagctgtcccttcccgtccagggtgtgagggctcgggacctgggtggatgtgctgtatctgggcctccaggccccagccccaccgtcactgggctgaacccgtagcggcctgtacccagagaatggtgcgggtccggctatcctcccacgagaacaggggctcatagccgaaatggcgctgagccttgtcggtgctgacggtgaaggtggtgttggccacggccagcgtgtaggggttcagcaggggtgcgtagagcaccagtggccgcagcagccactgcagcagggcattgagggcagccaggaacaccagcagccagtagggcagcaatgggcgggcgcccaccagccgcagtccgcaggggcccaggaactccatgttgaaatcctcgtagctcctgtagggtgatccatcgtagcagaagtatacctggccgcccatcagggctgcccgctgctccagctcccgggctgccagcacgtgcatccaggcaacattgcctgccggtggcggaagagaggcggacacacccctgagtgcccttgcaacaccacatcgaggctgctctcctgggccaccccctctttgggcccaggtagttgccgcccacatccccacagcagcctgggaaaggctgccttctccctcgccctggtagtcacttgctctcctgggccagcctgcatctgcaaagaacctggggagaggatagagaaaccaggacctgcgtggtgggccctgagaggcttggggactgcaggatggagtggcaggtgaccttattccctgtgtagatgctacttcctttaaaaaaagttttagagacagggtctgtctctgtcatccaggctggagtgcagtggtgcggtcatagctcactgcagcctccaactcctgggctcaggccatcctcccgcctcagcctcctaaagtgctgggattatagatgcgagccactgaacccagcccttttagtgctgtgtacacactgtccctctcctctcctctcctggggaatggctgctcccatagctgcaatcttctctgtagcctatgatacactttttaatgtcccaacttgcatggatcctgtattctctgcaggctgtggagacataatcacagtctaccttggcccatgtatagaccatatttttctagccagagtccacacttctctcccagggccatgtgggtcctgcccccttctagagcaagtcctcctgccatattctcagcctccccctgcctagcccagtcctcacccacatagacccggccatgctccacagaggccgggatggcccggaagagccaacctcccaggcgcaggccctggcggtagaagtccctcatgatctggtggccttcaccgtagatgcccgtgggacgaagggcacacgtcaccaggggcagccccccacggacctggtggcaaaggcaggtactgctgagacctgggacccgacagcttgctctcggccccggcctccttgggctggcagggtaagggggtgtgcagggcaggagccccatctctgcgcctcctttttctgggctcaccttcctcccgttggcctccaggaccagccactcggccagggccttgctgcaaggataggggtgcctgtgcactgcttcgtatggggtgtcttcgttgcccctggtgggaggagaaggaagactcaatgctgagggaaatgggctcttagaggacaagagggcctgccactcacctgtagaaggggtgacctttggtgttaggccccacaacttccatgctgctggtgtagaccaggaaccgtgttccggtctgcacacaagcctcgatcacgttccgggtacctggcagaggaggaggcgtatccaagctgcagcttcttccctctctgcatcttcctcctccccatcccaggtccagggaaaaccatgacaggtcaggggaggcgggggcagggctgtcaataggacaacttgtcccaggggagtcaccggaggtcaaggccaaagacagagtggggaacaaacaggcaagatggccaggagtgtccagagctcctcaccctgcacgttgacctcatggatggtcttgggactgg

SEQ ID NO: 97658 - DNA, 27492 bp, Homo sapiens
cccagagtgggtgggtgtagacactctgccatgggtggtagctttatttgtaatcctcccagtgaaagctttgggaaatccagccctcccaaactcttgcctttcttgtaagactttctaagcgcatggctttgtcgtaagacttctcgtggccatgtgtctcaccctaccgttcgtctcaccaatgaaccagagctgggataccagcaaaaaggacccaaaagactgtttcaccacaattgaagaggtcgtggaccatcccccaaaatgaatcccaacactggaagaccaagagggttgacgtttgctatcttgaaagctgcagcccccgtagagaaggtaagctgtgtattccatcaaaggtctgtgtgtgcaggattgcatttccaagagaaggcattcctggatcatgatcattttgtctgagctgcatgtggccaagtgcactgggggaagcagagtttaggaacttgttcctgtatggattaagtgggaagtgaaaagtattaaatatatgggcgggagtggtccaggaaggggagagtggacatttagtacctgtttgggcccctgcactaaatgcttcacatataaggattagaaaaacacccaaagattcttagataagcatttcagtgccattttacagaaggaaaaactaagatgcagagaggattaagcaactagaagagaccacatagtgagtaaagcgtggaacagcaaggattccaaccctgtagcgcagctttatgtctggaggaagcaagtcttagactgggactgtcaggccaggaagaaaactcagagcatggacaaaaggttcggagggagtgaggaccgatttatatgtgttgaggtaaaccaggtggatttctgttttggagaaaattgggaagtcaggcttaggtagagggtggtgtgtttggaggggataaaatattttgtgcacctgtagtttgtgtattccacctgtggtagaatcttgtggctcagaaagaaagaacctgcctcgggtaatgctactaagaaatgccaaacagaattagaaccagagtctacttaacccccttctcagaagaaattgtccaggttttagcactgaaagtcttacatcttgggaaactgaaccgtcccagttttaatgctaaaagtccctcatcctgggaaatcccttagctgtggttttagcactgacagtcctgcttcctaggaaactccttacttctggttttagccctgaaagtccccaaaccccttagtccttggcaaatctggatgattgatccacttacccttctgttggaacagatcctagagcagaaggagcacaggctgggctgccatagcatggacccccaaaaagccactgtcatgaagaaatatcctgtgaagaaaatctttgcagggcacctgaactcccaaagccactgaggagaaggtaagggagtactttggtgagtttggggaggtgaatttctccccaggatatggtttatgctccccaccagccaccagtggatgcttttttctgttttccttggctggtggagttgtcagtggagctgctctcacctcctttcttgcctttggagggccgccttttctgagttccctttagggcctgagccaggggaaggcattggccctgagctttgcctgtgtttccagatggaggccattgaactttcagtggatccaaagtctaacaaaagacaatgtcttgttttcgtcaccccccaaagaagaggaacctgtgagaaatattctggagaaatttaacaccatcagtggaagcaaggtgaggagtctctacctccatgcgcctcccctcctgcctctggagaggtagccctttggttaatggcaacccaatagggtaaccaaccatcccattttagcattgagagcattgtgtcctgggagacccttccctggaatgtaaataatcctggttttagaaacaaagtgtggaaggttggaggaaatgcacaaaacccgtaagttttagagggtctgaaagcaacattgtctatcaaatggatacggcacagattattcatctttacttgttgtcacccatttgaccactgatattggcaaccataatttgtagttcagaatggtcatccatccatcgttgcatcattcaaagtgatgtggcttaagtgtatataatgattattaatagttcatcttcgactttgcctgtggattaattggtgtgctttgtaacaagatagtgctagtttaattttttaacattgtgaatattgtgaccatgttttctaagaggtcagataatgagaatggttataataccaatgcaaccatgaccccatcactgaagaagaaggctaaacgactatgtaattttgatgatggatggaaggacacatactactgaactaggaaggtaaataaccaaaacagagcatactacataatgtacagaaaaaaatttgagattggacatggtggagaaggggatgtgcaagcacatatggagggcaaatctcacaagtaagatgggacaggtgaatgcttctaaaccaatcaaaaatacctttgtttccccaaaagacaccaatgctcagtcaaaaatagcagctgctgaattagcatgggcataccaggcaaataagcctgcattgtcatagcgttcccttgattgctctatgaaactgagtaaagtttcatttcctgattcaagaattgcagctaaaatatcctctggacaaagaagaagggaaattttttgataacagatgtgttgactccttacagtataaagccaatttctgtcatatctcaccaacaatcctggtttctacagtacatcaattttaagtaatgtgccaaatcatggcagcaaaaatatgttccctctagctgttaggtactttgacttgaaaacaggagtttcaaatcatcttcttcatttctgtgaggattttaatgaaactgctgaaatcataaaatattgttgatattttgtctaaatacaaactagacttagctcatctatctgtgtattcgtcagacagtatagatgtaaaattttggcaaattgcattcagtctacaaacttcttaccaaagaaaatgaaaagatcttatccattcaatgccttgtacatcttatatacaacactgctaaaaagggatgtgagttgcttaaatgtgacattgagactttcataatgaaagcttttggttacttttcaatttcctcaaaaagtgcaaaagcacttatggagatttttgacttcacagaaatggaaggtaacctctttagacgtgtgcctgcaagatggctgtcattgtagtgagccatagaaacgatgctaaaatgttggcctgccataagatcatattttcaaaggacaagaataatgtcctttgacattgtttgaaatctgaaaggagaaaaaaatcaagaatctgaagtgggccttaaaaaaatcagtaagtcccttgtgactctgatttttatgaatctgtctctcaaaagccagggtgcccccagaagaactgagacaaactgagtttctgaacatttgaaaatgaggagcaggctcaggatccacagggtgtaaccatcccgtgaggccctgcctgagcagccagccagtcagtgaggctcttcaccttacttccatttctctgattccatctatgtacaacttacgaaaacttgcattattatagactgggagttcttaaattggaatctgtgaatctaaaggggccagaggatagaaatcaggaaatctgaaaacttcgatggaaaaaagtttttatttatttccatcaggaaaataggcaacaaaccacagcagtattagtacctgtgtctctgtcatcactaggaatcacagatatccacgttacagatatcttaaaatatttatgtacagcaccactctgaaattatggtaataattagatccaccccctaggtcttgtaatctttaatatgttaataaagaagcacatctattatgtgacagatttaaatgtttaagaatttgatttcaatgaaattgcatttcaataaaattggcttcctttgcaatcctgtgtattttattttgtgcatttctccagactgccaaagaggttggtgacacattgaaagttaagagtctctgctgtggatcatgcatagaaagctttacaaaacagttgaggggaataggttttcctgcatccttgccttgggctgcagcctttccattagctggagaaggcagcagctggtgcctatgagttgagagggcagtggtccctttgcctaagaaccatcctgttcccacatattcaagggtatggaattcccataatattcaaagagtttttctttagttttaggtgatacgccttgagtaggaatatcatgaggctgtttccagcttcgagtatgttggtgatagggtgtaagggatctcagagcatctagtcttgtccatatcttaaatccaggcactgaggtccagaggggagttatttacccaggtcacatcagatgaagataatgaagtattccaagaggattttagttttattccaaatagggtaagtgttctgagagtgtgaggagagaaggtgaggaggctggggtaaggatgggcatagaaggggatggaaaggagggctgagagaactcagaaccaaatttcaggctatcactttctccacgccacattccagtgccttgccatcaactcttctgtgaatcttcaggaattttattaattccccaggaccaacttagactttcataagttagatgtagttatattacttccctgaagcacttttatacacaaagaatagatgtagcaaacaaacttcacaagatttaatttttgagtttccttttttattctgaggaattccgctgtaattctcagtgacacagaacctctagagctacttcactatgacaaccttcttcaaatctccaaagggctgttacataaggaagagggtcggagttctgtattcaatcaagaaggcagaagattgagatgataagttgctacagggaggcataatttaaagtcaatttaaactgtaatcccagcactttgggaggcagaggcgggaggattgctttgagctcaggaattcaagaccatcctgggcaacacagtgaaaccccgtctctacaaaaaaaaaatagtcgggtgaggtggcacacacctgtaatcccagctacttgggaggttgaggctggagaatcgcttgaacccaggaggcaggaggcagaggttgcagtgagacgggatggtgccactgcactccagcctgggcgaccgactgagatcctgtatttaaaaaaaaaataaggtcagtttaagtttcgttcctgggattgagcggattgccttgcattaggcaaggttttaagtgctttccaactctggaattctatacctttcccagtagatatctaaacccagcaaatcctgggcctgaagtttaaaactaggatcctcgtctcccaaccacatctagatgatcccatagtgtaatgaagggtgcttgggctttgacaccaggcaaacttggattttgacctgggacaactaagtcacttgacctcactgaaccttagctccctccactgacagtggggacagtctgctggagggtgtgtagaagacctcgggttgccttttggaggttctggaaatgtcccttgaaagatgaatggagttaatttaaaaatcttcgccttctgtaattttggcttcttgcaaacacgcttcctgccagtcctgctccgtcaggcgggaggcagcaaaccccagccctggctccaggacagggccgaaggcaggatagacggagcaacgggtccggctgccgccgggatgttgcagcacagggcctcctggctgcctggcctacaggccgcccggattcagccggagggcatggaccgggtggagtcctgcaaggcgagaagggacacagcgcatgcgcgcggcagggagggcgtttccaggagggagcggcctttgctcagcgcgagacggctgggcgccgagtgggacagcgctggtgcggagactgcttccggactccaggtaccgcgcttggcggcagctggccccagacttctgtcttttcagctgcagtgaaggctcggggctgcaggtgagctgtgcatcccgcaatggagaccttcctgctctgaattttcttacaaaactgcagaaatataaggggcgttgcttagcgggcatcccctcccccgcgccaaacctgtacagcaaacgatgatgcagaggaccttgaggggattttgcagggcatcggtcttacctccgcggtatcatttttctcctcctcccgagtttctgccttctggtatccctaaatatcccacctatcctgcctcctaccttcctggatctggggtggtggggtgggctcatggaccattgcaaaatgcttggcaggattttaaccttctcagcaccacccagaccccactcgaaaatgtgccttttgtgccctccaagagctcaagggtaggtaattgttatatctttagcatgtgaaaatgctttttatgtaacagttcaccgaaaatctcttarttctccgaattttggaggatttggggcgggcagcgaggctgtcccctgtcaccttgttttgtacctggtatggtaaatcgttttgctgcattgcatccaagatgcgttttagtccttccaaggcttgagcatcacatttgtgatgagagcgtgtgatgtgctgtgcacatcctctcccaccttatcccttccatgttaacacagcctctggctttaatgtgtgcttctggcctggccacatggctccgtcatggaataggtgattcttttgtctgaatattctctgtgagaacagaatcttcttgcaagcattgggagtagatttattttgcctctttagaacaacagtcagttcgctaaggagattaaggggctacctgtttcctggcaataaagctgtattgggtaggtcagttacagaatgtcttcaggcagaagctgttcctttggttcactcactcatttattcatttaacaagtattttaagtacctgccttgtgcatggcagggttcttggtgctgtgaggaggacaaagataaactgaaccttggtttgccctcaaggagcttggctggctgagagttgagagaatcccaaccaagtaaaagggtatgggtcctcaagagaagatcgcaggaagagctggggggctcaggatggagtggaattaatctttcacaacagctacttagctttaggagaaaattaggtctagaagttacacctgataatgaaagaactctcataagcttcagatctgtatgtaagggtgttttccggactgtgtgttgggcgtctcagactgaatacattctaaacaggtcccatcattcctagccacctccctcttcccaccgccacacacctgctgctgttcccatgttctctgtctcagggaatagcatgaggctccccgactccctacttctcctaatggtctaagccagatacctaggggtgagtcatctctgattcacccctgactttcccttcccgcctcaaattcaattctgattctacctcctgaacttctgaaatctgtccaccttctctccattctcattgccatttctctagataagcctaccgttatcaactaagctcttgcttactttactgcaacagcttcccgatttatctccctgcctcacttcacaacccatcttcactactgcaactgggaagtgcttgctggaatttaaatctgattgtgaggctcccttcagtgatccttcattgcccttaggacggaaccagactccctttacggggcttatgtgggtgtacagccctgtctttctcaccagcaccctctcttttcacaagccccttgcacttttcattttgagaacatgctttcttgtgccattagggccttgcacatgcgctcccttctgccaggaacacccttccctgcaccctcttcacttgacttattcatgctcccctgtagggtaaatgcacctgacagcaataattaaagcatacccttagaatgaccctgtgtggcagatgaacctgaatgtgttttctgaactagggaacccaggcctgcccaacccagagatttatttcttgtctatgaagaacatctgagcccctgccccgcctgtcccatagaacaggggccatacggggaattgaggccttgaattttgagttaaatcaaggttgccaggtggaggtcattgaggggagggtgttaagagaaaatgctgcataaattgcatgatgtttgcaagcggttgtttkcctgcccagctcaccaccactggactccctcctctgtaagcccctaatgggtctcttttggcctcttgaacctgttgccttccttattgaggttaataggggtttggcacaacatctctccaaggtcccagctgggaccctgtytgatctgggcatccttaggctcccagtccttgctgggtgccactccttgttatggtacccacacctctcstcttagggctcattcacacatctgcctcctacagctgtgttgtactatagttcctggaggaccaaggccatgtcttagcacttaccattgcttcctgctgccttgcctaaagaaaatgctaaataaatagctgttaagtcgaattgrstacaaatatatgttataatactatggtatgattcattaactaaattacaaattcaccctacctcagttttctcagtgtgctgaaatagtaatagccttacacaygtcaagcttaaaataggtgtaagggtgaatgagaagagtaatcattggagcagctaatatttgttgagtgctcagtatgtgcaggcactgttctaagtgctttacagtattaaatcatttaattctcagaacaatcctataaggtagatatttttgttatccctattttaaagatggagaaactgagttattgaggttccacagctagtaagtggtggtatcaggtttgaagataagcatactttatagcatatggttagctcctttagaaagataataagtaggatcaaacatgagaagttcatgggctgaacattgtaagttaccagatggaacacagtgccctgtggtcacaactttaagctatgaagagcatgtgattgatccagaattgaaaactctgaagaacatgtttggtttacatgttcgctttttttcagcagctaactcagttatcagaggtgatgttgcatagaggttaggactgagacttccctaagtcagagawctttgttttgctgtataaccttcaggcattgcttgcattctctgtgygccactttcctcatctggaaaatgaggataatcatgacagtacataccatagggtgtggtcatgattacatgagttgatacacataaggcacctagaatgccttagaatggcacctagcacatagtaattgctcaaaaacattataacctytttattattattatttgtttagccatcattcagtcagcaaatggtttttggacccaggttctccctacatgctacatcctactgtaccacttctcggccacagatgagctctcctgttttaattctccttcctgcagatgatgagcatttttcagtgttgcctcctttttggtgctgtcatctcctgtgcctcagcttccctcccccatacccttcctcatagtaagttctagtggatgactctgagatcagctcaaaattcttcttctttttytttttttttttttttgagacgcccaggctggagtgcagtggcacgatcacagttgattgcaacctctgcctcgcaggttcaagggattttccggtctcagcctcctgagtagctgggattacagacatgcaccaccatgccacgtcygggtaatttgttgtatatttagtagagaaggggtttcaccatgttgactgggctggtctcaaactcctgacctgaagtgatccaccagcctctgccttccaaagtgctgggattacaggcgtgagctacctcgcctggcccctttttatgttctacattaatttattaccaattgataatgggagataaaaggcccattaacctaaatgataagcaatgagaaaattgtaaaaatatgcaaggaatctcacttaccattcctcacatttacaaagataattaccttccctgtggaagaaatatagacgtgagaaggctcagaaataaaggcaccactaggggtcttagaacttaaaaagctgtaaagaactccagaactcttttcatctattctcctaacttgcagggagagttgagggtgagggaggggcatggtctgaggcccagtggccacatctctagcctgtggctggcacgctatctactgcatctgagagaattgtgggcagggtttcagtggaacttctcaccactgggtatgtttcagctgctgctatgatgcacagtaggatgtcattgtcatccatttaacttcatgctggggctatattgtattctttagtgatttgccattgattaagtgtggatgtctctgcyaccacagaagagctatcttgcaaggaaactaatgacaaagccattgtttaaactgaattagtcaatctccaagaagacatccatctgtaaagaatgagaggactaatatctgtacagacatgaaagaattataagatggarttgtggaagttaaggaatttagaggaggaagaagscatttgctccagatcactttgatagtacagactagagtcaaggaaattaggaggtaattaataagggtagaagtcaggggagaaggttyaaagggaggtggcatacaggggatagtcgggcttttggaggtggacagggagggaggacatttcaggcatggaagtgaaaagtgaagattgtagtgtcacagttcagtgaagagacctggctgaccagagcagaagttttatttgggtaagtggaaagaattgaacagctgagagtatggcagatcttgaagacaggcagaggagaatcagcttgaggtaccccccagagtgtgcttaacagtgatgaggatgaaggggaaagtagagggttgggagaggtgaagtttgaacctcttttttcccttgagacagggtgtcactctgtcatccaggctggagtgcagtggcacaatcacggctcattgcaacctcaacctccagggctcaagcaatcctcccaactcagcatcctgagtagctgggaycacacgtgcatgccatcacacccagctaattttttgtatttttactagagatggggttttgccatgttgatcaggttggtctcaaattcctgggtttaagccatctacctgccttggtcttcccaagtactaggattacaggcgtgagcaccatgcctggccgaacttccctttctttagtagactagagaaattaatttctgtaattctgtggaatgtctttgtattagtcattctcacactgctctaaataactacctgagactcggtaatttatgaagaaaagaggtttaatcaactcaacttccgcaggctgtacaggaggcgtggctggagaagcctcaggaaacttataatcatggtggaaggcaaaggggaagcaagcatgtcttcacatggcgacaggagggggagagcacgtgaagggggaagtgctacacgctttcaaacatccagatcttgtragaactttagatcatggaacagcactagggggatgttgctaaaccattagcagccacccccgtgatccagtcacctcccaccaggccccacctccaacactcaggatcacaattcaacatgaaatttgggtggggacacacagccaaaccatataagcrtatcatttttagatacattccctccccaaaacttttttattttgtataatttgtcctttcccccttgctttagaattgcaaccttgccaatggacctgatcggttttggttatgcagccctcgtgacatttggaagcatttttggatataagcggagaggtaagcctwacccaaattttcatgaaagggaattagtgggggtttggaggttgtgctaggtcatgtgaggctctgtaagtaggatgagaagctaaagatgccttagaggtggctgaagaccagcgtgtcttggaagggactcatgaaaggaagaggcttccgtggggctgagcatgacagagtgttccaacctgggggttctgggcctctcttccaccacaaaactctcacttcacttcatcatcagttgcatagttaattgatttaatctccctcaggaccactgcttattattaaatgaggatttttttttttttgctttacataatcgtggtaccaaaaaactgagttatattgatcctgtgtgttgtaatgaaaacattgttaaatattcagttatcatatccaaagttgtctcttcacctttgtccaaaagaggggggaaaaaaactcaggtaatcaattaaagagttttcatggagaaaaaggaaaggtcaaatttttttattttacttttattttagaatcatttatagttatgatgtctcctagttatgtttcatatatatacacaacctttagtcatctttctgacaaactgtctcttacgttttaatgacattttttaaatgaagttttttatttcaaagggtattgtatttgtggcagtggttgacttgaatttgagtgaaaaagccaggtctacatggttaccagttagcttccttccttaaaggctgctaagaagtcaaagaccagaagcaccgtatagctcttgtagctggggggctggcaggtagaattgaccatcatctacgattccttaaagcctgtaattcaccttggatttttgttcgttgtttctgtcttaatgtatgtattagagatgtgtatttgaaggaaaaaaaaagatgatggcaccaaagtaagacctgtaaaccaagtactcagaggttgatgtttcacaatctactttagaaaggactcagtttaaaatgctaagattgtttttgaaaaaaaattttcactgtcaaagacaatgtctaaataacttctattacagaacagaaaagaacatctgggcatttttgcctgcctttatgagaggtggaaagaaagtggggagagagatatagagagtgtgtgtatgtgtgtgtgtgtgtgtgtgtgtgtgtgtgtgtgtgtgtggaaggaatcattttattctaactcacatctcttcattgtttaccagctggtgggaacaaatgaaattacattagctgtgaggtctctgatttcaagggcttgttgtccacctgcacaatatggtttcttggcctcctgcaagagccccctactaagtgatmctggaagcccccaagggtattatgggttcacaaggaagctcactttgtagtataatgtgggttaaaagcatgggccacagaatcaagcattcctgcattccagtcttgacgctgccacttaccagcactgatactcaggtgagatgtttcaacatctgggcctcagttcctcacctgtaaattaatctgttaggattaaataagatgatgcatggtacacatttcacatggtgcctggcatagaataaagttttaatcttcttgtttttttctgctgctactgccctgccagtggraggtctgtgagccatgaggcataatacctttttctagttttgtactctagttttgtattatgttctaagctgccagtggctcgaatgtcttagaatgtgtgtgtaaagtgagttaactctcctttgacttagagcttccctaggtatgagtcctatgtagctgggccaggagacccttctacgggacagttattgagaataatcttgggtcggtgaaagatgtgatgtcgaaatggtgtttagtgggaggacacagatgtatccaaatcctaaactagaccagctgtgagacacaagttgggttaaacggagaagctgatagatttttattttgatgggggtacagtggggagagagggcagccagtggcgggacacaggatgctgagcactgtgcttgcctgggctcacccctcctcccaggtaggtctccagagaggtggatgaccaagaagatgctatgatatggaggctcttcctaggccaggtaacatcgagtgcccagagtgaaagagggccagatggcattccctgccttgtcccacactagggctgaaccagaccttacaccttcctactccagttgaagggaagggcactgacacagcaatcccttcagagaggtgcaggtgtgcttgctgggcaggctgctatttggacgaccataagagcacctgcagggaagctcccagatgcatctttcaactctttttaaaactcctcttccaagactgccccacccagatcaggcatcccaggaagtgggaaggaaaagagcttagagctccttttcttgtagcccccactatgggtcactgagcttgttctcaggatctttgctttcttccaccagcgtggttttcttgtaaaacagcccacagtcctgccaccttcctcaggcaagatgaaatgtctcaagaaccttcctggttcttgctgctggtgagcctgcccctgctgtttgctgtctgatctcatcaagactgaagtgtagacactgccactttctccacatacttaagtgtgcgtgtttggtggtggtggggagggtggggtggggtgatcctaacagtaaataaaccttcagggtatacagaaaggagcatcatagaatctctaggtgagaagacaccttaatggtcacctagttgtgcatttcagaaagtgttttaatctccttaatatccttatctggtatcttctgcttgaacatgacccataacaggggtgcattaaatcagtatttatcaagtgctcctatgtacctggccctgtgtctcgccctggggaaacagcaatcgctcacaagtgagtaagggcagactgacattcaatccatgaacagcatataaacatatgatcaggaatagcggaagactatgatgggggcccttgttcagaatggtgggttggagaagacaacacttaagcagacatccgaaggtgagctacacttggccaagtgaacagtgcagagacaagcagtctgcacaaggaacagtatgtctgaaagccatgacgaatagagtttggtatattcagagaactgaaagaaggccagggttcccacaatatagcaaactggattatttttcctaagagctttgggaagcactaaggtttttaattaggagagtgacctgtccagatgtatgtttttaaaagatcatcttactgtgtttgaagaatagcttttgggggaaacaatgtgtaatttaacattatctccaactgtaacattctaagccactatatatttatatatttatatatatatatatatatgtatatatatgtgtatatatatatgtgtgtatatatatgtgtgtgtatatatatgtgtatatatatatatacatatatgtatatatatatatacacatatatatatggcatggatgattaaccccgttttacaactgctaaaacttagagaggctaagtgacttagccagagtcctttagccagcaagtgaaagaattaggagtagaacctagcgtgtttgtcttctcattcagaatgctgctctggtgtgtgtgtgtgtgttgtgtgtgtgtgtttgtgtgttgtatgtgttgtgtttgtgtgtttgtgtgtgtgtgtgtattgtgtgtgtatgcatgcatgtgctgcagtggttcttaaccctggctgcacatttgaatttccaatggatattttaaaaatgagatgctttgaccctaccccccagggattttaacctaacagattctaaatagggtgagttccatgaagcaaggattgtgtgtgtcttattcatagtgtcactgccatgtaacccactgtccagtgcacagaaagtgcttggtgtttgccacagtgctctggggtgggtatgtgggttgggggctgggagtgtactggtggggtgagtgcatgggatagggactgggtagctggggtcagtattctgattcttcgtctttcttggtagggcctctattagtccttgagtcctgacatcttgaggcatgaaggtttgttaattattcaggatggaaccattgcttggtttgtatagcacttctgtctttacctctataaactaaaactacctttgcatcttagtttttatcatcacaacctcattgcaaaaaggaggcaaagagaataggaaaaattaaaaaagaagggcttaaggaagttaaataattgtccaagatcatgtaatcagtgtccaagccaccagaacaaggcaggttttcttatttccccaagtgacatctaaccccactgcactgctgtgccctcagggctcctctgccttgcatttgggttcagcaggaaacagtcatctcctagaaagtatccatgaagaggcctattcttaatttggctttgtccagttactgtgcccaagtaggaatacatttgaaggtgcctgtatcatactagaagtaatggaatgaattcctttccttttgggattctctttgtgatctcatatttttttccccttccaggtggtgttcygtctttgattgctggtctttttgttggaygtttggccggctatggagcttaccgtgtctccaatgacaaacgagatgtaaaagtgtcactgtgtaagtaaggcatttttcctggttacagagactcaaacattggaggtgatctttttgataccctrtgctagatataytagaacatatttagtcaaatggcaaatggccatatgcatgtgttgaggctgaatacaacacttattcctttctagaaagacctgataaaaaatgatggtactgctaccaggccttccaactcagaagaatatttctataaaaactcgttactagaaaaattgaattaggaaaagcaaggaattattttcagattttctgctaactctcctaaatgcatatttagcatagtttttacattgctgtggaaataactaaaaaagagacagccttgcattatttcatttaattcacaaacatcttttagattctgcactgccttaagacttaacctaaaaaagcaaggctgacgcttttttagctwcttcccttgttaagtttaatgggagaatatccacagaaaaaatggaaacctgtgtgtttaaagtcaccaggacacttgactttcatctcacttgaaagagatacacagtgaagatttagaaaaccataccaaggacattttctctagttgatttattattcaaagtgccttggtcgtgtatggaaaaaaatataaatgaagacaaaattgttctatatttgaaggagagwgagagayttgggttttttttttttttagttatttttataaggggctagggatatttttagtaatgaggttgtgttagatrtatcagccagatgtagtgatattaggatttttattgatatgcatttaaatagttcacaagtatttattgtcagtcattttattttttatatcaataaacagtttttctttgaaagctgtttttaaattgtggcattgatgtcctaatctcttacataaaactacctctcccttcatagatacagctccaaaaaggctgacatgatgcttctgaataaaatactattgcttagactattatttagtctccaggcatcaaattctccaaaatgggatgctacaaaacaaaaccaatcagccttctttttagtattttttttttattaatcagatcttacttgtaaaagatacattaactattttctttatattcagttaactgaacattaatgagtgtctcctgtgggtccaagtgtgctacttagtgtttctgagggaagttgaataaagctcagtgctagccttcaaggcgtgttctttgaatagaaatttaggttagaaaaagactttcttagctaggcatggtggctcatgcctgtaatctcagcacttttggaggctgaggccggtggatcacttgaggccaggagttcaagaccagcctggccaacatagcaagaccctgtctctactaaaagtacaaaaattagctggatgtggttgtacatggctgtaatctcagctactcgggaggctgaggcaggagaattgcttgaacccgggaggtggaggttgcagtgagctgagatcacgccactgtactccagcctgggtgacagagcaagactctgtctcaacaacaacaacaacaacaacaamaaaaaaaaaaaaaagaaaaagaaaaggtctttctcttttgaagatatttcaggaatggattttaacatgtttgtttacccagaaaccttttcggcgaggtagatgatgatgaagtgtttctttgtttgttcttttgttgtttttttgagacagagttcgctcttgttgctcagtctggagtgcagtggcgtgatctcagttcaccacaacctctgcctccccggttcaagcaattctcctgcctcagcctcccgagtagctgggattacaggcatgtgccaccatgccctgctaattttttttgtatttttagtagagacgaggtttctccatgttggtcagactggcctcaaactcccaacatcaggtgatccacccatctctgcctcccaaagtgctgggattataggcgtaagccactggcccggccatgaagtgttttaatagagcactttatcttttcaagacaatggcaactcagtacctatccataatagttgtaatgttagaaagctttaaatggtacccgctgttttcccacaagcattgataacatgtttgaaactctggttcatgaattagtttggttttcagttacagctttcttcctggctaccataatgggtgtgagatttaagaggtccaagaaaataatgcctgctggtttggttgcaggtttaaggtaagtaaaactattttgatcaatactttcctctgctgttgttttgaagtgctgaatttttgggaaacatcaattttaatttgaaagatcaaagtcctttttgttataataagcatgacagtaaaaaccttaagatagcatggattcagtgggtctttgatattgatgtacccatgaacattcttattggatacgcatagtgttgctgtagtatctggtcacataggcatacttgcctttttcagaagaaagagctaactaaactcagcctcatttttcctcaagattcacccatctgcaacactaaatgtgttcatttaaatctaatactcagtcccttttagagagtttgacagagygacagtgtgatacagttatttcaagtttttaagggacagaaatttaatatttttaagagtttttaagagagaagttttaatattttttaaaagataaacagagggcctcaagtttctcttaatttgatccagtaattctatccatgagattaagcatattaccaaataaaaatttagagataacattttaaaaatttctccagaaagctggctttatatgttgaaagccataaacatgtttatttcctttgatagacattttcactttttggaatttattccaaagcagtgagatatgcacaaagactgatgttcattgcaactttatttctagtgaaaacacaatagactgaaaaattaggaacaacytaacagttcaccagtaaggagatgtttgaaaaaatgttttgtccatttaatggaatattgaatgagcattacatttttatgttttcaaaaatgatttggtggcattggaaaatcttagtgacataataaggtataaaaacaggatsaaaacaaccacatatagtgtgattaaaaaaagtttgtgtataaaaaaacaggaaggaaatatttcaagctgttagtgtttttctgtgggtgatagtgtgatgaataattgtaatgttcctctttctacttttgtgtagaattttctagtgtgactatgtattatgtttcagggaggggaggaggagtgtgattacaaaagacagctttccagttatagccctgttctaaaagtgatacttggtggtgggaagaatcagaagtagggtttatgggctgggtgcggtggctcatgcctgtaatcccagcactttggaaggctttggcgggtggatcacttgaggtcaggagttcaagaccagcctagccaacatggcaaaaccccatctctacaaaaattagccaagtgtggtggcgggcacctgtaatcccagctacttgggaggctgaggcaggagaattgcttgagctcaggaggtggaggttgcagtgagccgagactgcgtcactatactccagcctgggtgacagagtgagactccatcagaaaaaagaaaaaaaaaaaagaagaaaaaatgaagtagggtttatggatccggaagaaggcctcagttaatagaaagtagctgagattgaattagtaactgccccaagttggtcctcgattattttttcaagttgctttattttactagcttctgaaagtttgtttcttcccaaacctttctcttataaaccctcatccaaggttttcagaacaacaggttctgatttttccttattcatttagcgaacattttaaagtggctaattcagttatgtctgggatgttttaatcctccaaggggttgagctgggagagcccccaagccaaggattagtaacactactgggtaggygagtgcatggccctttctgtcttatgccagataaaagtgactctccctttgtctttgttttattttaaatccagcctcatgatgatcctgagacttgtcttgttgctgctctgagcatctggaggaacagaaaactaagttcatgtcatcctgctgtaatgggcagagcatattttttttgtatttaaaagataaacttcaatatggaatgctagaaacacaaatagcactgtcacctctaatatgaacattagtttgaggtagtttttttctaaagcaaaaattttaactgttttctaattgtcaagcactattttcattaaaagtgtctaatgaatcatgatatactcttccatttgttgtgtctattttttatatatttggtattttttgaaaattccaaatactcatgtctcaagtaagcttaaactacaacttgtcacataaaggaagtcttaagtggagttcacagaatgataatgtatctatttgtcatttgtgttatatttgaaattattagraattatgctttttccattttaattgtattgctgccagtgctatttttttctttaaaaaattttattcttagcacactgttatgtcctaactgaatgtattcagtattcaaataaaagacattttggttcaaacctgtttctttcatgtcagtttttcctctgaatactcaaatcatctttgacatttaaatattcaattattaacgaaaagggttgagaaggagggtttatttaagccaacattctacttcctgaggcgtagatattttttctctctgaaagagtaacgattctgaaacaaactgattttgtttcaaattaccactttatttttaggcatagttataacttttaatgtccaaggcacttttagggcccaaattgaacatcgggagacctgaatcccagcccaattcttccacccacttgatgctctttggaaggtcatttccttttcctctgactcagtttctcattcttaaggaggaattgaactaaatgatcaaccctttagagctctaaaaatctacagttcctatcctgttggttatgtgcagtggtgtcatacttcaaaccctttctttaagtgaaagcgtagggtcctcaactgataacggcagagttcatatggttctgttagattggttacctttcccaactgactttcaaggaggttgttaaactttcagtgataagtaattcaattaagggaagaaaaaagctgtaccagttgaaccgaataggaaatctagataaaattatttgatgtacttaaaaaaatcccaatttaaagaagaagaaaaaaaatcccataaatcctaatggtggcaaagaggttgttaccacaggcaaggctggaaaaagccgtcatcattgaggtgctctgctcacttgctagctgtcagagatgactgaggagaaccttcagattcagactgacagcagcttatagtcaaaactgattacgatactgaagtagaaactaactgtgaaattgatcctagaaatacatgctgtgtctgcagaatactctagtgattcaaagtttaagaaactggtttgaagctatgctattccctggacttttcccaaaaggtcatagaagtgaatgatagtgatgtgtgtgctttttttgttttgtttttaaagaaatctttggcgtccatttgcatatttgtgattttactcttttgcaatacgtagaatccagaaggattcatatttggatggctctgattaattggtgttttcttgttttatgaaaagtagaagaggctctgtaacttacaggtattaggcagtttatttcctcatgtcttattactttattacattaatgtggctttatgatatttttatgggtctgctaccaatgcatagtgaaatatttactacgtttcttagactttgtttcatttgttaatactcagctactgtagtgctcatgtttttaagaaacaggccatgttcaaatttaaatatattcttcacagtctcaatggattcttcatccagtggaggcttcctttggcttccaggttggagaaatttattaattgtggggatgtggctgattctggccttgaatttctaaaatgcaaaagaatactatccaagagagaagaatataacaaaacaaagtaaaatgcaaatgagccacattctggtggaggtgggggataattgggattttcatacattgtggacattgcaaagtgatactgccactttgcaagttagcaatatttctcaagaaccacaaaaacgttcataggctgttacgaagtgattccattttaaaaattgtgtcctaatgatgtaatcttaaatgtggaaaaatctatacctacaaagatattgttgcaacactatttataaaaacaaacattctaaagcatcctggtatacaataaagagaagtcctcatttttcttataccagaagcatttttcatgttatgtaatctttgaaaactttaagtggctgcatagaattctatccaatgaacatatcctcatttatatagatgtttctcagtttaatattagacatttaagttgtttatgattttcactatttaaaatcaggttaggctgtggcatgggtgaaagtggccactttggcggtgcctcgtcctcacagctaatgggaagcaagcgtgttctagaaagccagagtctccagcgacccctcttaccaccatcatggcagtcccaggttgcaacaaggacagtgtcagagcaggctgtaaaaaatatggcttcctggtcacctgacttttgaatgctgcaactttctccaagtagaccccaaagggacatagttttggatgtcagcagtgcaaacagtgaagattgatgaataaaatgaagaatgaataaattgcaagcattactggaaaaaaagaataaatgaagaggagaagaaaaagcaaagagaaaagcaatttttttaaaaaaggaaaaggtcttattcatccagttccactgaaaaggacatttcaaaagaaacaaaaatatcagaacaaagaaaagaaaaaaaaagctgggtgtggtggctcacacctgtaattccagcactttgggaggctgaggtgggtggatcacgaggtcaggagtttgagaccagcctggccgacatagtgaaaccctgtctctattaaaaatacaggaaaaaaaaaaaactagccgggcatagtggcaggtgcctgtaatccaagctacttgggaggctgaggcaggagaatcacttgaacctgggaggtggaggttgcagtgagccgagaccacaccactgcactccagcctgggcaatagagcaagactccatctcaaagaaaaaaaaaaaaagaaaaagtaaatcaaaaaaaggaagccaggtgcagtggctcacacctgtaatcccagcactttggaaggcagaggcaggcgatcacctgaggtcgggagttcaagaccagcctggccaacatagtgaaacccgtctctactaaaaatacaaaaattagccaggcatggtggtgtgcacctgtagtcacagctactcgggaggctgaggcaggagaatcgcttgaatccgggaggcagaggttgcagtgagccgagatcgtgccactgtactccagcttggggaacagagcgagacttgcatttcaaaaaaaaaagaaacagaaaaaaagaaaagcattcttcaacccctacttgttatgaatcctccaaaaagtaactgaggctttggcttaagccattaaatttaaagatttgtttaaaaattatttgcccttccttggaatttgctatatattatgctttgcaataaatcacagccttttctatatagacatttttgatgtgtgggaccattatccctctggcaatatatttttaatgtgctatgactgtaaagtattaaatcagtcttgttacttgatagccatgccccaagtatagctatttgtacatactaaacatatcatttttgatgtttgtgtctctgtgtttggctggtgttattacttcctaagttgattgtaaaatggctttactacagtcaacacagttcatctacctagcagttaatgagtattgctcaatcaggtgtccaccttctagtgatgaagcgaggtatggggtaatatttcactcttgacactgaaaaatttaatagctttataagatgtaatatataaagatagtgaaattctttactgttgttttttaagtctcgggtttttttttaatatagaagatgaagctgcttaatggtcttgactaggacttttaaaatgaatggtgtctgcggaaagatgatcatgaaaacatttaaacaaagtttcattgttttatgaaatgcagagtttctagtatctgcctcctttgtttttgtaacaattaaaatatttctttcttgttaaaaaaggttattctgaacacaataaatggaatatacatataatcaagaaaagtttcaaaaatagactacattgtaaagaaatgaggcagactaacaatgttaaaacatgtttataatgtaatatgggtcaggtgcagtggctcatgcctgtaatcgcagcactttgggaggctgaggcaggaggatcatttgagcccaggagttcaagacatctgctttctcttatcatgttacgttttagtttaccacattatattgaagttaccggtctgtatgcttggtttcaccaggagatagctgccttgagggcatctttgtatttctagcacaggccttggcataaagaagttagtaggttcataaatgatggtgaatgactgaatgaaagaataagtggataatacaaattcattctccctgcagttcttgggagctatttggatagcattacctgtagcagaggaaagcccaagaggacactgggtttgcactcttcagtcattaagatgacttcaggttgctgtgtatcagcccagctcagccgattgcccacaagaaaatcttgtctgtggtctctcagtgcctgcatgatggttaataaggaaaaggtagaagatgaaggacacacctaacatataatttaaagtcagcttgatttggcagaaagtcttctagaagttaagagacctggcttctaatctgttctttgccactgactagctgtgtgagctcacgcaaaccccatttctcttgggcttcgtgaggtgaaaggaatggaatagcttaaaccctcctgacttattctgaacataggaaacagctttatctcatgtgcttgtcttcttttcatctcctctccctgtagctatcccgtgaacctctgtagagtgattttagcaccgaccctccattggtggctcttcctgggctgatggtatttctacttgcaccatctcagggtggattcttgaggtgtgctgctcttcggaaggtactgtgtttgcagggagagtgtcattctcagagggacccaaccctcatttttataagcgaattttcttcaaatagggctgtaaattatgggtcactttgagtcaaaattgatcaaatacaaaatgaaatgtaagtttggaggaggtggtcactaaggtacattctaggccatagacttcatgatgttttgatacttgggcataggatcaggacctagagagacctgagtacaggttccagctttattagttgtatgacactgggcaggttacgttgcttctttaagatatagttgcttcacctgtaaatgaggaaataatttatccttatttacagatgaagcaaccacatagtatcttgtggagttattataaagattaaatggattaatgcatgcgaatcatatagcacagcacttggcactcagtaaaggtgagccattattattattagcactgttgttagtgcagttacagtcacatttttagttatgagaagtctgcacttcatagtatcttacaacaaaaacttcatgcattagtttaccacatggtggtggtaaacattcactctgttgtcagtatttgtatggtaaaagatcttaagttacatgctgattacaaaggaatacattatctttgaaacacttttgaaggaaacagtatggggaaaacctgggggtttagaatattcacaatttgatccagttggagctaggaactcaccaggtataattaagggaaaagtctaaccgaggaagttagggtatctgtcatctatgccaaatacataagtatcaactagataatctatgttacatgattaggctctaaaactgttgatcatgataaatatattcaaatacatgtattaaatcatttaatgagaactattgttattcaacccaaaaaggataggttaaaacagcatggcaggtgagtttgaaaaacttaactggctcttttttctttgtttttaccaagccctaacatttttcatcatcttttcctagacttactaatattataatgactgcacctggagatgaagagcattaataactaaagaaggcatccaaccctgaccaagtgcaagctttcagacagcattttacagctgttaaaaatgcagagacatgaacgctcaagtattatgtttaaaacaattttttaacttttagaatactgcttagaattctaaccttacaaacagccctgaaccccaggac

SEQ ID NO: 97659 - DNA, 48364 bp, Homo sapiens
  misc_feature (1)...(48364): n = A,T,C or G
nnnnnnnnnnnnnnnnnnnnnnnnnnnnnnnnnnnnnnnnnnnnnnnnnnnnnnnnnnnnnnnnnnnnnnnnnnnnnnnnnnnnnnnnnnnnnnnnnnnnnnnnnnnnnnnnnnnnnnnnnnnnnnnnnnntaaacataagacaaaaccctagtggtatagatggaagactatgttccagtaaaccagagagctggttcctccctcgactctgcacagccactgaaagtttaaagattgcaaaagtggtgtggggcaaggaggtagagtcaatcaatgaaactgtgaaaactgtttaagtagcactgctcaaggagaccaggagagaagattctgttagagacgtagcagtaaaaccataattctcagacagagctaaggggttggagcccatgtctctaaagtcaccctgctgtttggaaaggatgagggagaagacggaagggatgacaagctgcagagggtaaggattgacagaagaaccgaatgctgacatcgagggaggggagaggcaggaggcatgggacgagggattaggagagctgggagcccagcagtctctcgatagctgcgttgatgtcccctcctgtggcaatcagggcctgcaggttggcctcacgattgatgaagcccatggagttgagctgctccagctgctgctgaaatctcacttctgacgtctgcacctgtgagtttccacttccagccaaaagctggatcatctgctgcatgagttgctgctgggtgctggaagcccctgttggagaagatgtggctggcgtggctggtgaggaagtgggggcctcgggcgtagaccctgcgttgctgcctgctgagggtgctggggtccgggacatcccgaaggagacaaggctgggtaccagcccaggggcctcggtctgcaaggtctgtagtccctgctggatctgcagcaatgcctgcatggctcggggattggtaaggatggagagtgactctgggttctgcatctgctgcaggaagactgggagctgcaggcggagctgctcctgcagttgggggttccccgcgaagagcggcacattcaccatcatctgagcagcgaagtcggggttctgggcaagcgtctgcatcatgctgcgcatgtagggtgctgagatcacattctgcatcagctgggggttctcagagatctgctggaggagggcttgcatttctgggctattgaacatccctgacctcaggctagccgcattgatcccaaaggggttcaagactgtcgggtgcacctggctggtccccgatcctccggtgccctccccaccggacccgggggcctgggaggtggggggcgaggggctccaggggttagggaggggctctcgattctcagtccgcagaggctgggaggatgagctgtcggagttcccggccagggaagagaagggattgttgccaaactgttcccgggcagcactgaacatgggctcctggatgtccgtgtacatgcggcggagggcattataccctccagggatgctctcaaggttgctcagggcccggtcctggttccgcatcatctcttgcatcacggctggattccgagcaagctccattgtctgcctcatgagttcagggttattgagcatgtggctgatctcagggttccgctccatcaactgctgcatctggggtttggcaataatcatgtgacgcatcaggtcagggttagacatcatatcctggaccagggggttctccatgatctgcaacagcatctcaggattggacatcagctgcctctgcatctgctgctgcagctccatgaagttggcagagcccaggcccaggctgcccagccccaggatgcccccaaagccagagagtatggacgcagtagcactgggggatccctccccagtccctggagagggccccccaccactgctcctccggcttccactgccagcatccgaagaggcactgtcagaggtggagggctgggtaggggtggtgggtgaagcaggcgtggtggagggtgctgaggcagggtcaggtgtggagggggaagaagcagtggcagcagctggatcttgagccttctgaggggtcttgatgaccagatggacagtgagcccgtccttgattccgtgctggttcagtgtgtccccatccttgaggatcttgcctgacaagatcaggaccagctgatcctgctgagccttaaacctccgggagatttcctctttgaactccttgaccgaggctcgatcgcagatcacaatttcctccttgtccttgggggtcttgacggtgacccgaatggggggcctcgtctcggccccgctcggctccgccatgccgccgccgccacccggccgcccgccagcccgcccggctcctcctcctccccgctcgcccggccggcccggctcggcttctgccattttttttcttttttttgagacaaagtctcaccctgtcacccaggctggagagcagtggcgcaatcttgcctcactgcaacccctcccgtgttcaagcgattctcctgcttcagcctcctgagtaactgggattataggtgtgtgccactatgcccggctaatttttgtatttttagtagagatggtgtttcgccatgttagccaggctggtcttgaactcctgacctcaggtgatctgcctgcctcagcctcccaaagtgctgcaatagagacgtgagccactgcacctggccaagaaatgaaatattgatacgtttcacaacatggaagaactttgaaaacattatgctaaatgaaagaaaccagttacacaagacaacatataggtaaatctcaatagacaaatgtttagacagaaagtagattagtagttgcccaggactgagggaaagaagaagagagtaaggagtgactgctaatgggtacagatttcttttgggttgatgaaattgttctaaacttagattgtggtaatagttgtacaactctgtgaatacactaaaaaccatttaggtatacactttaattcagcacaagtggctgaattttacacaatgtgagttatgtaacaataaggattaaaaaaaaaagctatgtaaccagccatcaggctactgcaacttttggagtttgggactctagctttcaagtgaagaacggactactttgggcctccaaggatattatttcttgaaaccaaacttttgcttgatattgtgattaccgacaacaatcccaggtacagattgtgtatgttatcaattaagggcaaaattttaagttagttgactagttagttcctgtgtctggccagatgtggtatatgtatttcacaaactttccgtgggaaccatttgattctcaggcgagtaggttgccctctgctccggaatatatttccaggtcagttgcccccaccatcaattagtgtgtgtgctcaaaagaatgcaaactgatttcagcattatcttaaacaaaacttaattaggaaggtaagtatcctgccaaaaaaattacataatgcattacaaagccaatttaaaatgaattttggaccattccgaatatatgaattcagcataggtttaaatggttaatagtcatgcctactgatgtagggtataacttatcttttttaacttaaatctttcttttaggattctgtaattttactagttcaagtttcacaagaaaaaaaataacaagctaaaatctgaaacatttgcctcactataccatgtttatccactacctctaaggccttacaatccaaaatgtttgaacacctcactattcaaagtgtgggtccatagcctggggatcacctgggagacccacccccaaactactgagtcagaatccgcattttaataagatccttgggcaatctgtgtgcgcattaaagtttgagaggtcttgctctcacaccagactgaagctcactgcagggcagcctcaggaaaagtaggcagtggggtcattatgatctatattaagacaatgaagaagaacagattgtagcaacctcaaaatgtccctatttgattcaaagtggtaaaagctgtaaactttctatttgtgtaaatatacatgaagctcaggaagggaagctgtggtaaccgttccttttacttaaacgtcctgggagttgcagcagagaggagcttgttctaagggaagcttttctgtttttcccagttgtccccagttctacctcctggctttgccctttcagccccatcaccacatccctggctaagtccagcctgagatagtaggctgcaagaagtagatggttaagggtcagctgatggcaggagggttctgggtgaaagatggaaatctcactcttccaagttcacctctcagtctgcaaaagagcaatcagactgagaagtacctctctttgttttccctctccccacttaagatacaaaagtgtagcctttgtgttccttaaagagctccaactcttctatgtctatatcttttgaataagtggaaacccatctattgccctttccacttttctgtttcctacaacggaagcacataatgccaagtaactgggagggcctcccatgtgatcagcggtctctaggccatggtcaagactaggaaggactcaagagaggctcctggaaggtgatatttaaaatactgattttaaggttctacccttaagattctttttgttttgtaacctgtttttcttcaaataatatattttgaacagctttttatattaaaaatatataatgattatgcctacagagtatttcattacctcaagagtatatgacgcgacttcaaaaagtccatagaatatacatattataaaaaaaaaatgcatggatttcaaaattattttgcaccaaaataaacctacccttaagattctgattcaggaggtctgggcttaggcccaaaaatctacgctttaaccagtgcccccaagtgattctgatgtaggagatccacacccacacacgaggaaacagtgatataactggtttgaggacagcagtaccacctttgcaaataaatcacttattcttaagcatctgttttgctttttgaactgatgtcaacttcctgattggtttccaaatggctttgcagtactcattcaacatttaccgagcaatttcagttttcagtttgcagagaactgaactacccgaggcttgttctgtgtttggactggggatggggagcagagaaggatgtgatcacattaaagctatttctcaacttcctagaaaaatgacaaattgaccatttcaagatttgtgaaacaggttagcattggctaaccacagttacaataatttactaacctttttggagcccctgtgtacaagaggcaccaagactttctgggtgggaaggttgattctgtaaccaaactgccagggtttaaatcctactttctccatttatattatatgactatagaaaagttagcactttgggaggctaaggctggcagatcacttgaggccaggagttccagaccaggctggccaacatggtgaaactctgtctctactaaaaatacaagaaaaaaaaaaaagaaaagaaaagttaatttaacttttctgagctcagtttcctcctcgtctgtaaaatgaatatgtaacacctcactgagttcgtacaaggattaaatgaagcacttaaatgcctaattgatgcagatggctccaagaatttaacatttacgaaatattcactatattttttaggttaagggtacaaaaccattgtgagtacactaaggaatgattatagaggctgatcgaaattctgcaaaaaaagcgtaaattttacgtttcattcaagcagttcagactcacgattttaactagagtaatctggggtttgtttgcttgttttttaaggttccctaacccttggcttcttggggagtttgatgccgcactcagccccaaagtcccccttaactcccaggtttagcggcgacagggggcgcgcggttgacaagggcaggcgccccggggaagtaggagcaggggcgccggtgagccgcagccgcagcsgcagcctagccccgagggagggaggaggagccgagggagacgcgggacccggagccccgcgggccaccgcccctgccggccgcgcagctgggaggatgcggacggcagcgagagcgtgcgcggccacgtgacggccgctataagagcgcacggggcagacgctcggttccccgccgtgcctcctcgctggccgcgctccctcccggtgccggcttctctgagtcaccaacctgaggctgccccggccgcctgcgcacccggcagcaccatgacaggtaccgccgcgcagcccgccgccgccagccccgggaccccggcttcctgcccagccgccgcctcccttctcctccgccctcagccccggagtgttcccggcaggacgaaaccgccgcaaagttgctggctggccgcagccgggcgtgtttctgcctgcgtcagctgccgccccgccgccccccagagtgcagggatggggcagccgggcagagcccgggccctcggccggagctctcgttcctgcttccgtctcctcgtccttcctcttgctctcacggcgaagggccggcgggcggagcagctgcggcggggccgtgtgggggtggggagccggttcccctgggggttccaggcgggagtccggggcgcagcggcatcgtggggagctgccccggcctctggcggcccggaaccccaggaagcaggggctccgaggcggggatactgcggcctccgcccggctcctccgccgcccgccccggccccggccgccacgctgagcctatttttaggcctttggggccgggttgcgggaagccgggagtcggactagcgtccccgggcgcgagccccgtctggtgggagggcgccggctttggcttcacttgttgcgaggcgtccgggccactccacgagttagccccagcactgggaagctccgagttagctggtccttccgtgtcattgaggctaatagccagggttattacagcagttgaactgccacaaagattgcaggtgtaacccagagttcagccgtctttaggaagattaaactcctacccagctgtcattggtctttcttggtcatttgtaatgttggctagtctggtgttctaacctgtgttctatcccttatttaatcttggaaatcatccatatccttgcttccagaaatccttgaatcctgctcaccttattacatttttctccatgatcgcctggaacctggacttcatttgagttagatgatcattcattttgcctagcttaagtatttttggtacagattgacagcgatgttacccatgttataatgggctgaagataatagaagcaagtacaggcggatgttgatgggcctgtcaagggacaggtgccactgttcagagctttcctagagtgtgagtgactgggaagctggtggcccttcgggggtggggaactggtcttcctacaacttagtagttggcctgccgtgggagagggcctaataaaatgtgtgaagatggctctcaggtcagcagccgagggatgcgctggcccactaggcaacccacaacttcctctcatgtctcggtggaatttctactgcttccagcctccaccttggaaaacgggcaagggagaatgagggaaagccagrtcagaaagagaaggacttcatgacaaaatgtcccaactcgctggttaagcaactgactcctaccagaacttgatccgaagtgtcctatgcatttggatgcccaccaacttgctaatgtttcttggagatggaacatggcccagaattgtcccagggaatgactggagaaatcttgaagcctgtgctaggggtcttgggagggtggggactgttcagcaggaggaaaaatccatgtatttaccttctcttctggcaactaagtgattattggagattggggtgcgtgtctgttggtttgggcggggggagggggagggtgcaggatggacctgcaccttcttctccaaagaaaagcaggcagttgtttagggcttcttgggtgatctccaaatctatttatcagtgattgataactatttagatagaagcatcaaggagggaaagcctctttgaggagctgatacttgaggagagactcaatgttatttttcagggatattggggcaggggagcttttgctccacgttgaggaaacagttatgtataagatgcctggagttcgaggctgcagtgagctatgatcacaccactccactccagcctgggtggccgagtgagaccctgtcttaaaaaatacatacatacatacattcctgaggcatggcataaacgtaagcaccagaatgaagaatatggactctgctttcagactgactgaattgagtttgacggttggttttgtgcttgtctgaaaacactgtctacagtaccttgtagaagaaacagcaaatgtactacttgatctcttcattaccatctgttagttgcctggagttcaaactcttggtattaagctattgttttgtctgagaatttagcgtgtcggatttaatttctatagcttaatcaacctgttgaaggttgccatatgtgcctgctatgatcttgaaccattcttgaagtgggcacttggggttttctccccaaagggctacagcttgattcatagagaaagttgatgttagaggaactggttttgctgaattactgtttgaatgggttcctggggaaaaggctttctccagataagatactgtaatgagtgttttttttttctttgtattaagatcaggcctttgtgacactaaccacaaacgatgcctacgccaaaggtgccctggtcctgggatcatctctgaaacagcacaggaccaccaggaggctggtcgtgctygccacccctcaggtctcagactccatgaggtgaggacctcgctgccaccccagcatccaaggggctctgacatccttctccctgttgctgacatcattggacattgaggccatgctcttttcaggaattgagcaccgggtagagaaaaatgagagatgctgagtgcaggattgctgtatttgaaacctcctcctagcttttgggagatattccaactcaattcttttctggaaggtgttatgctggcccacactttctggttccaactaggaggggaaagaaggagtcgtcttccttcactccatcccctctgggtgatctgaaggagtgtgtcaggcattccctgcttacatacacctttacacagtcacaattcatggacattcctttcccaggatgcagcaggggctacattgtttcatgttgcaaactagggaaactctcaggtgacttagaaaagtagttattttatccattgccagttgatatttgtaagctaaatatctttatttacaatataatacactagaatctttaccaaagggctttccaaactaggttttactaggggaaacacactaaagggtataaactgcttcatgattggttagttcactttgrtccgatggaattaagttttgaagtatttgggccaggtgtgatggctcatgcctgtaatctcagcactgtgggaggccaaggcagttggatcacctgaggtcaagagttccagaccagcctggccaacatggcgaaacccgtctctactaaaaatacaaaacctcatctctactaaaaatacaaaaattagctaggcatggtggcgcgtgcctgtgatcccagctacttggggttgggggctgaggcaggagaatcgcttgaacccgggaggcagaggttgcagtaagccgagattgtgccactgcactccagccagggcaacagagtgagactctgtcttaaaaaacaacaacaacagaaaatcgaagtatctgaatgagctacctagtctctagtagtaacttaaaaaatatccgggcacactagtaactttgtgatgtgtttatttttctggtctcctggccctctaagaaattgaaaatgccctttttgtgactttttatttttttcccaaaaagtataagcacaggccaagggtctctaaaaagtagacgttctgtatacatacgtatatctttcacactaatacctttgttcctaaatggtaatttaggaagatgccaaaaaggctgtctcctaatgtgtgtgccctaatttgtagtctattaggatatgtctaagaaaccagatctagtcttgcatttcctgtaaccaccatcagttgactttggtcagtgattctcctaaccatttctcttcaaaaacgtcaagtttactgtgtgaactgtaccatatttttgtacagctttggagacagaatacaataccagttttgttctgcatctctgatgttataaactttcagtatgatacgttttyacccgtgctcagtttagtgtcttacccaagtctaccctacygatccaccataaagagctttctaaaataaagccttagttaatctggggcatagagaagtgttgtacctcacaaaccaacgtgaatctcattatacttaaacagcgtgctcagcatgtaataaatgctggttatattggattctacaaaatggcaacctgatgaacagagcccttacacatttttgcaagctatttccacaacctgcctgctattcagtgatacaataaaatacaaaaacccagaaaatgtcttctataataacgttttaagatgagcatttcatcctcaccataagcagttcttactactttagtgacgttaactggacatgcaaataaacacagtttgtcctggagtaaaattagaacagatttaagggtacatattctaccaaagcaatacattgttctagtaattgatggagaaggtaataaagcatcagtcttasagcagatgggtcacttgttctgaaaagatgctaagtgtggtattctggattttattttgacagaaaagttttagagacagtctttgatgaagtcatcatggtagatgtcttggacagtggcgattctgctcatctaaccttaatgaagaggccagagttgggtgtcacgctgacaaagctccactgctggtcgcttacacagtattcaaaatgtgtattcatggatgcagatactctggtgagtgtggctttgagggtagaaaagaaagacatatatatatatggtgatggagacctgtaggcatttgaggaatgctgtcaagacttgacggtaaagttcagatagaaccactgtcatgaaatatgtcaggggatgaaggagaggaggcccaggctgccttacagctgtcaccatcttttgtgttggatgacataggaagaactcaagaagggtattctgcagcaaaaacatttctgtaatgctctttctcccctttgatcaggtcctagcaaatattgatgatctttttgacagagaagaattgtcagcagcaccagacccagggtggcctgactgcttcaattccggagtcttcgtttatcagccttcagttgaaacatacaatcagctgttgcwtcttgcttctgagcaaggtagttttgatggtatgtatttgctatcttcatgtctgataagctgttaatagtaatttctaggggctgctcttctcaggaatataattgctgtggtttattctgcctggaagatataagagatggagcaagcattttaagttgtgctcttctgggaaatattgtgtgtgtgtgtgtgtgtgtgtgtgtgtaaatgcatctttttctatagatgtgaaagattaacctaaactatgataggcaattttataggattgtctttaagttgtcttcctgtatctagagtatgataaatgtactgtgattattcaaaaattcaaaagactgaaaaactttaacatctgtctttaaacctaagtaaacgtaagctcaagagagtttgacagccattccaggaggatcaagcattgtcactatggaaacttgaggaataagcctgataatttgggtctcattctctcaggcggcataaaaaagaagaaagtttgtgtgaataatctttgcttccaaactctcattctctataaggctgtcagagtagtatctgcagggccaaaaagtagaacattggcaaagtcagcatccattttctataacatataaatgtatttatagttatatttatataatggttctgtctgtgatatagggcctcacatcttttggagaagttgatcaaatgaattagtaagtgtgctttcgtttcaggccaatttctgaaataacaagccatgtttttaaaaacaaaaacacacaggacaaaaccaatagttaatatgcagaaggagttctttgaaaaattatttttgatggttcttttgaataaagacccagaatagagaagaaggaggacattctcttagaagccctcccagcagtgcctcactatcagatatgtgacattgtagcagggcacagtgctgtgtgctattcacatggggttgggccagaggcccaagctctgctggagacacagcggggacttctttcctcctctcccctttccaagagtagatctgagatttgcagtaagtagatcttttggaaatagcagaaacagcctttctcatttgacaaaagattcagtcctgggtgcagatatgagaattcatttttattaattggttagaaagttaaaaaaatattaaactttaaaaatgaaaacattagacctataagtttgttagattgctgaggtgaagatactggaagttaaaacatttcaaattatacataaagctgagattgggttttcattgttgctattcacagaaattgaattatttttagttatttggctgaggatttgggaattgtggctatatatgaaatgtaattgaaaataatagggaagtttaagtctcagttttatttcactatttagcttgtttatgctgtaagctaatagttctcaaaacaagggtgattatgtcccccaaaggacatttggcaatgtctggagacatttttggttgttacaactgaagggggagggtgcaaagggcatctgatgagtggaggtccaggatgctaaacatcctacaatgcacaagacgatttcttccaacaaagaattacctagcccagcatgtcagtagtgctgaggttgcgaaactctgctctctacatgctctaaaacagagcaggagtatctgaaccataatgtatggcagcatctaacaagaagtgaagtcttgttttaagcaaccttaaaataagaaaataataatgtgttaaatgttcaccgtggtcaaggccgaatgaaacttcttcgctttactgacatgtttttagctcctgctattttcctttcatagaaggaatgaaagctgtattagcctttaagttcaaaagatgtattccttatttctactgcttatactgaaagttacctttgcataaaagaggagagtgtttttagcagaagtccactgtttgtcttaaccttctcgtcagagtgtagctttcttcacctcctctcctaatttgaaggaagtaagtgtaatcctgccagaaattcggtgtaactcttttcagctttagtaagtgaatcacattctaaagtatatcttgtggcctgccaactgcctgaaatccacatgattttaatcatgtaaagagaatccaatttctaacctagaaaacgattagatgttattgagaggtaagactttgattaccaaacagtagtgtgccgtggtaaattatctaggttataatttgagaatatgaaactaactaacctattctttgttaagaagcttggatgcgtgcagagtgctcgactaggaagcacttcctgctttttcagccagaatctgaaaccaccgtgagattctgtctgtgcctctagcacatttcattattcagcagcaggtttccaggtgctggccatcctctgaggtattccatttactggctcattggtggtgaaggactgaatcttctctgttaatagaaattgaaagaggtaaaaagtcatctatgcagctgagaacttatggttctcaatatgttgtttaaattcagcagaagaatgaattagcagttctcgaatcaaaggttgtgttcacttgaaatatgtgttaagctttacttagcaaagaaagctcactctataccttgggaggctgcttctctctggaggggtttactatccacttgaatcaatgtgtgaactgtgtgacataaagatgtgttggacttatgcttgatagcaataaaatatttctttatggacaatgactttgtctaatggcagtaacctttgcctctggttttcaatatgttrttatataaaaattataaatatagtaaaagtaaatagtcttaaatataaaaattaagaattatataaaaataattttggttaggtgttgtgctgtaggcactgatgaacattttcaggtgttcctttcacagttacccacattttctcacaaccatagtttctccctccaccacccccatagtcagttttaagtcccggaattttcagctcagaccagttttacagatgactgtatctcagtgtgaatatctcgcaggtcatgtttttaacctctttyctgtgttcatcagaaactggtggggcctgatgtccactgacaagccacacaggctgttgatggctgagcatttgcagctgcttttgcaacccttctcatgcaaaagaatgtggctgtcattcttctaatcaccagccctctattcacagcctctccacctctctattctgtgactctggccaagagaataatcctaatatggcaaaccatacgaggtacctggacttctctttcttcctaaaattctataatgttagattttagaactggtgactacataaccgaattcatggctggtgtctaattttccataatgaagagtcaaacttctatactgttgtattttcaaactgtcttggcacttacttcatcactgtaattacatatttcccgaaaagttgaacaatagctgttgtgaaatagttctacactagtattgtataggatgtgacaagataaggttagcttctgggcatgttagcactaagaggggaagagagagctcattatattgtaggttctaatcagcagttttgcttctgccacatcggtgaaatgaggctgatgaacttgactctgaagaaatcaacctgaatgcaagttgaggtttattttcttttcccctgtgactaatatatcttaagagtrcttgtatagttgaagagttaagtgcttaaaaattgtctattttgtctgtatgtgttagtttcaaaaacctaagtcagaggaattcatattttgtaatttggaatatccttaaaaaacatcttatactcattttgattactgcagtgtaaatatcctaagcttttgattggtgtactggaattttggtctgtagttgaatttctagaaagaagaaaacataggagagaataaattagtagcagaatattaggtatgatttatttaagtagagtccaggatccgctttgaggtcactatatttgtgtgttccaaattctaagtggtcattgagtcccataagcagagtacagtaatgttttaaaataatgtttaacagaaatgatttggtgctacattgtattaaagtgtaaaattgaccccagagctagattttaaaatctttgtagttaattaggcttcatgttggacctgcccaaaaaaagaatgaaggactgagatatttcaagatggtacttgtccaaaccaaatgagctgagagattttggtgtgcttcacttggttccctgacttgataggtcagcccggacagttatcttcccatggtgacttcccccagccacccaagcactaggctgcctgttctagtaatttatcagttgttttggaaatgactgtgttctcttgcatttgtgtcattttattgatagtttggataataagtatcttgaggaaaagcaaaagccatatcatgtaatggcaaaattaatgagcacacgtaagtttttttaagagctattgttatgtcactgtacccgtgaatatacttttttaacttagccacctgtctccagctttgtaactgtcagagatcatgaaccctgtgagaaatagaggaggaggaagggactaatgtgttatatgtatgcaggcttgtatgctggtcattttacctactttttcacttatttctcaacagtcctgtgaggtaggcattcatacatccattcatataacaaatattaattgagagcctgctatctagctagcactggggacctgccattggtacagttcagggcagcagcttscctgatgtctctgagctaggcaaagtcaggtctgaaccagggtccttctcaactctggttgggttatgtgttgtggtggggtgggtggtggtggtgggtggtttttccattcccaattctctcatatggcagcattcttgagtatgtatcctgagaataatacgggatggaggaagatccctattaccttggctttatgacagatgaattaagtaatttctctgagtagacagagcagctggtatattcctcattttacaaatgaaggaatggaggctcaagtcttctatctctattgctactgttcctcccctctgatccaaaatacctaaaaatactttgtcgtttaaaatcagcagcacagttcatcgtcttgcagtgttttatggagtctagatgtattcttggaagggttcctctcacctatatttctgtagtaggtccattcattatttcaaacataattttaatttctaatctgggcaaaatcctaaattgaaggggcaaaaatagactggtaaataatacagattttattcctgcctctataaagtttatattctgagaccttacagacatctaacaactaatacacagttatgtaatcatgattctagtaagttcagagtactaagagtccagactaggaggacctgccttagactgagaaactgacatttaagccaagaataaatgtttccttgcaagtatgtaataattaatagcttgatacttaataatcttttaacaaagtagtgaaaaacaaaagctataacatgaagtagtaaaataaatcagttattcttggcttaaatgggttgaggccagtgagatgccgtgatgctggggcccaagctccaagtgcctggatttccataagccaccttgggttaatctaatgatcctcagtaaatctcataaaaatatccccaagagctgggctttcataagctgtaatttattaatccttagcatgctcactataggcagtaatgattatatccaccaagcattttgtaggaagttagttttaaaaagaagtgtccaggcgcagtggctcacacctgtaattccaacacttcggaaggccaaggcaggtggatcacttgaggtcaggagttccagaccagcctggccaaaatggttaaaccccatctctactaaaaatgcaaaaattagccrggtgtggtggcacatgcctgtagtcccagcttcttgggaggctgaggtgggagaatcacttgaaccctggaagcagaggcaatgagctgaggtacgccactgcactccagcctgggtgacagagcaagactctgtctctgtaaataaataatagatagatagatagaagtgagtcacatgttcatgtcagtccttgtctctagctcaattacaatataaagcatattttactataattttttttttttttttttgagatggagtttcactgttgttgcccaggctggagtgcaatggtgcaatctcggctcactgcaacctctgcctcctgggttcaagtgattctcctgcctcagcctcctgagtagctgggattacaggtgcctgccaccatgcgcagctaatttttgtgtttttagtagaaatggggtttcaccatgttggccaggctggtcttgaactcctgagctcaggtgatccacccacctcggcctcccaaagtgctgggattacaggtgtgagtcaccgtgcctggacttttactttatttactttgtccatctgtccctttttggattttgaagtatctgagagttggaacctatctgaatcttcctattatgtgaataccaaatttataaaatgttagacattttttatagaaatgayatttttaaaagttattatcctttgttataataaagaagtcgttcttcaaaagactctagtacttctcaaatttaatatgcagacaaattccctagggattaagatgtggcttctgattctgtaggtctggggtggggctcaacagtttgcatttctgtcaagctcccaggtgatgcccatgctgctggaacccgggccacagtttgaggagcactattatagggggaacattcctttggctgagatgctggggctcatgtctaaaccagaattaactcactgccctgttatccacagtagacaagccagctgccagcaaactgtggaagagcacgcaaagtacacaagcattgaacaaatgcacagatttaaaaagacaccacttaactcttgtttctgtcttaggaaacaaataggcccagtttctgataaatgcatccatggttaccaggtatgtgaccctgctcagaagacctagaaagtaccaagtctgtagttgcaaggtgattacacagcatttgcatttgggcagccgggtggaaggatgattcagaatgagatacttgcttttgttcgcaaaacagatgcgatgtgccccttgttccatttcctttctccctgtctctcacctgtgttaccacaccctggtgtaccggatcacagctgctagtgatgcctgctaatcatgtttgttggctctgagatgagtgagattaaaattatcttaacctgtcagattagataaagctgcctctagaagtctgactaaaatgtatcggacaaaagttgtagggtttttgttatggaaaatcagcagtctttagggcatccttgtatgttttctaatacagatgtgcctagatttgcattctgctttgaactgtcctatcatttaaagatttttctaaagagaggatattggtaacaccatacatagatttttctgatgacgttaaaacatttgcctgaccttaaaatgttgaactgtgcatttgggaaaaggtggttaagatttctagaccgctgaatttaaaaattcagctacggacttctacatggcatttaatttatttttaatccacaattttggactaaatgataaacctttgtagtcacataatgaggtcagtggccctggaagttttatgacctgtgttgtcccctctggagccaaggttcttgttgagtgtttcaggatttgccaatttaacaggcactgttgattcaccagttctgcttcagtgccttttctcttccttgcttgttttctgtacaccccgtgcttcccagccttcctgtggcacacagctgatgggctgatgatgtttgtagggtacctgagggtaaacagaaacggccttttgtggccaaaggcagccagccagggactttgagggatcagcagctctgactcctgtttcccaggctcatgcaggtcggatttggaagttctactttacaactacgatttaggcctctgtggaattagatttctttactgcattatgggtagctgttagtcattttaagtggaattgcttcagttaaagaaggtgttataatgtccaggttctcaaattggataaatgtgtagagttttattattaatatcctttataacctacacatatattttttttttggtagtatacttcataataaaaattaaaagtaaagagtatttagaamgaaaagatctaagcacagttctcattcttgcccccagttgtattactaatattttagcattaaaagaataataggaaaaagaggggggaaggaacatctattacaccaatcccctaatgcaattactattattttatttactttcttgtaatataaatgttaattaatgtttatgttcttagttataatcacaatgtatgtagctgtatatattacacagtgtactgatgttgtctttatagacattagttttaattgctgaatcatattccatgagtagttagtattaatatactaaccattcctgtatggtagaatataagtcgtttaaatttttctgctgttacagaatatcttcaagattcttgcattcattccataaataatttgcctatgtgtaaggcattctgctacatgttagcatcataatggtgagcaaaaggccataatctctgttcttgtggaatttagcatctaattcctgattgtattttgcacattaattgtaagagttttttaaaaacctgttcattttgagagaatttccatgcagttgtaagaaataatacagacagatcccacatatgcttcatctgttttcccctaatggtagtaccttacataactaaaatgtattgccccaaccaggagattgacattggaccaatccaccaaccttactcagatttcaccagttttatatgtattcccttttctgtgtgtatgtgtatatgtatatgcacttttggtttttatgcaactttatcacatgggtagattggtgtgactaccaccatagtcaagatgcagagtagttccatcacaaggacccttcatcatattcttttttttttttttttttttgagaccgagtctcactctgtcaccctgccttgagtgcggtggcgtgatctcagctcactgcaacctctgcctcccgggttccagctgttcttctgcctcagcctcccaagtagstggaactataggcgcgtgccaccatgcccggctaatttttgtatttttagtagagacggggtttcaccatattggtcaggctggtcttgaactcctgaccttgtgatccacccacctcggcctcccaaagtgctgggattacaggcgtgagccactgcgcctggcccatcatattcttttacagccacaactacatctgtcattctttccctctcccctggcaaccattaatttgcttcctatctctatacttttattatttgatgttatataaatgaaattacatagtatataactttgtgagattggagtttttcactgagtgtaattaatttaagattcatccaggttattgtatctctagtttgttccgtcttatagctgagaaatatcccacatggatgtaccatatccatatacctgctgagtgacatttgagctgttttcagtttgtaccattatgaacaaagctgctgtgaacatttccttagcctttttttctgttcccatggaaccgattggcagtattttgatgattatgtgtaaaaggaaattagttaagacttcaggcctctgtacctcagccattagtgtctagtcccacatttgggtatctttgtagaatccaaaataagcctttaatgaatggcatgatgttttggctttgatagtttgtgcctcagaatacattaatttgcctattagctaaaattgtctttggttctcatatctgtcctttgtcttagcctattcaggctgctataatgaaatatcatagattaaatggcttataaacaacagaaatatatttctcacagttctagaggctgggaattccaagattaaggtgccagcagattcagtggctggagagggcccacttcctgggtcatagacagcttttttatttttgtttttttgttataactgctgcatgtggcagaagaggtgagggacctcacttgggcctcttttataagagcacaaatcctatgcatgagggcagagccctcatgacctaatcaccttccaaagaccccactccagataccatcaactttggggttaggatttcaatgtaggaattttggggtatctaaacattgagtccattgcatttttataacagtgaagcatattctgttgccatctttattgtcctttagaacttataagagtgaaactgattttctgttgttcgtcctttgaggaacagagacctgtcaggggtgctgtttaaggaggggtttcctcaagacaataagtgaacgcctttgattcttagagttgattgaaggtatttggaaaggatagaatacgcagagggtggataaggtacacttggactttaaacctaaagtcctgatcttactacttaactccaaaaattaaatagatctctagatttttaaagtctccttgaaaagtaaggaaaattgaatagtaacgacagccgactggacttgctgtatgttgagaaacgacctggattttttggcaaaggagactgaggagaggagtgactatgcagtattcctgcctgatgcttagagcaggtgtctgcctgcctgccatccccatacacactcgcacatatgcactcatgcacatgcacacacatcgtgaactcctgttctgctgcttgggagactctggttctgagtgtgttttctgaaatctcatgagtctaaaatagaaagcacatgaaatatatggaagaatgtgtcttgtattgtttttatttcttttgaatgaatggccatgatccccgctttctgaggaagatatgaagtccaggagccccaagggctgagcagacactttgctgtatcattgtagctgacgctggccacagtggtgactgagcaggatctgcccagagacttttggtcagtggtgggagagtgcaccataggggtaatgtggccttctgggccctctgttgataagccaacagttgtgggccctggaaaacaattccattgttccagtttgctctcttttactttttgattctttttgtcctgttatactcaggggaaagtctgaaatctttaactggaaataaagtgtacaacctgatccctatgtggtctggtccctgccgccttctctgagactcacctggtgccatgcaactcattcccgccgagtccacttactcaggccaccttccaggccttctatccatagcctcatgctcctgcccgccacaggtctatggtgtgcactatttttgttctgcctgggacacggtcccccgtctttcccccatcggcatttttcaggtatgcctgtgcacccctcagatattggtttaaacacaacttccttgtggaagccttccttcgcccatcagatgtagctcaagccacttccacgtgtgcctgtagtgccacgtacattccttcactgcattcatctccatctgtgtgatgtttgttgatttgatttgctgctgttggtgtctcccacctgacccttgtgaagacagtgaccatatctctttgtgcactgttgactctgcaatgcctagtacagtatctggtacatagtagctgctcaatagatatttgtcgaattaatgagttaaatcagggaaatggccactccttaaaatgtttttaattggtgtgtcaaggaacttaactcaaaaatgagggccgggcgtgatggctcacrttggtagtccttgcactttgggaggccaaggcaggtgtatcacttgagatcaggggttcgagtccagcctggccaacacggtgaaaccccatctctactaaaaataacaaaaaattgcctgacgtggtggcatgcacctgtagtcccagctactcgggaggcttagacaggagaattgcttgaacccaggaggcagaggttgcagtgagctgagatcgtgccactgcactccagcttgggtgacagagcragactccgtctcaaaaaaaaaaaaaaaatggaattagtgtctatttttaaaggtccagttatgtgctcctataaaattattaaactgtctagagatctgttaactaatttatatatttttttcttttaggtggggaccaaggcatactgaacacattttttagcagctgggcaacaacagatatcagaaaacacctgccrtttatttataacctaagcagcatctctatatactcctacctcccggcatttaaagtgtaagtgcagatggtttaactattgttggagatgttgagggcagagaattggggtgtacaattttggggctgcttcattgtcattccgagggaaataacagatagacactttgaggaaagtttctcttgtaagaaccgtggctgcaatggggagaggccttgatgttatcggttgcctcatgcttgaccctagggtccttagttgcctttgggacaaggttcccatcagtttctggggttcatggccctctggtaagttattaatatgtcatggtcaaaaacacagackcttaagctctgcagacttacaacttggaggagctgagtttgtgccctaactcaatgtcttccccatactggctgctgagctttggtttccttcacctgcaaaaaggtgttaaaagctccctcataattgttgtggggattaagccagatgcaggcagcagtgtgctgctgtggctaagaataagggctctggagctggatgacctcacttcacatcctgcagtgaccacttcctggcctacttactgaacttctttctgcctccatgtcttcatagggttattgtgggtagtaagggaggtaatcatgtagcatggttagaagagggcctggtctacccaactgctcagtacacgttagattgttagtcatttttatttgagagaagcaatatagtgttcagagtaattcgtaaaccagaaaggcagggcatatgtcctcactctgtcatttatctgctacatgacttaagacttggtgcctcagctcctccatatgtaaaacgaggaggaaaatagtacctacctcatagggttgtcaggaggatgaaacaaattaatacatataaagtgctcagtggacatttgttgtttttggtaacgtgcttgtttagcacgcacagtccctggtgcagttcttttttttttttttttttgagacgamgtctcactttgttgcccaggctggagtgcagtggcatgatcttggctcactgcaacctccacctcctggttcaagtgattctcctgcctcagcctccctagtagctgggattacaggcacgtgccactacacacggctaatttttgtatttttagtggagatggggtttcaccgcattgtccaggctggccttgaactcctgacctcaggtgatctgcccaccttgccttcccaaagtgctaggattacaggcatgagccactgctcccggcccctggtgcagttctgatacaccttacaactaatacagccttgctgcactgtttatctcactgttagggacaggatcctattatttagcctctgactcatttgtgtttaactaagaagatgatttagatttcttgaacaggggactagctgtcaggtcgatcctgagacagttgtgagcagcacagcccttcactgagttgggccaatctctgtcccatatggacattcctgagttagcggaaaacaaagggcctttcactcctcatatttcattatccaaagtcctctccgtaagtcttacaccacggtaataagcatgtctggctttttgtagcagcaatgtttccttttctgttcttttctgggaagactctatcaacatcctccagataaggattagaagcatctcatgttctttcctccctaackgttcccttggtatatgtctccaacatattacattctcttccctttgtacaatgggaacaagcagactcttaaacacaccaactgtgttctgagtaaagcagacaacaggattcactgtcaagggaggaataggagaagcattattttcacctctcagtccttggccttgtaaaatacaaacgtgtctcacatggaaatgtgaacctgatccattttaatccttacttataaccctgctagtctgaatagtgttcttgcaaaccatgacagtgtgacccctagagccgaatttgtctataataggacatttgcttatagtttaattgactgaattcagtttagcaagcaaaaagttgacagtgcagaggagaaagacttttgaatagtatgaccattccactcagtcctgcacagtgagcatgtggttctgtttgactccatctgatttccaccttagcaccattgagcacgttgtacctttcggggatagcctggtttatgcagacactgcttgcagtacttttattttaacacacaagaagcaggtggagcagagttaagttttgaggggtaagacagacttaatttgctagaaccttggccctttctctcaagaacccagttgattttatatcctccaaatgaattgcccccaaaaaaccagttagagatctaaattactgaaacaggatggttttcttcttcctggctcaatgaatgagtgctaattttggaaatcccccgggtttattgtaaccatagagaatatgacacactgggaaagttgggaacaactccgtccattagccggatttcagctggcccagggccggctggagatgctgctgcttcagtgcagcttgtgggggtcagctctacgtttctgtgataaggctgctcagagccatgctttgtcttgcccattgctgcctattgaggaatattgaaaccagatcacagaactcattttcccttccctctgccagaaaatatatttgcttttcttgtggagacccatccagagacatttttccttatattcttttatatttgggaaaggctgaaaaggtacaggtagttacatttcttttttattataaggtaatataaaattgtagtccaaatgttttttaaatgaaagtaacccattacaagcatttcggtcatcattgctactctccaaagatccctgtgaatttgaaggcccactcttgggttcagaataaccttggtggtctccaggactaagtagccctatagtatgctggccttccctaggacagcatgggtggtggcaggtggaattagagaccatggagtggtctggagcaacttcggcttcatggaaggaagaatggagtgtttgtcttgccaactccaaataaccatgcactaggatgtccccaaagcagtatttagacaccccagaatcttagagttttggatatctagaactttgtggcctttggtcttacatgaagcttcagctaaaggatgccctggtataaagcaaacttagtatgaatttaagccacaaaatagcacatctagtgcctttctctctgtatcatttggttagaacaaaagataaaggaaacaaactaatagttttatcacttcgaatgactactcaaatataaaaaaacagaattagtattttttttttgtaagggaagatcctctttaacacggcataatttgaaaattaaaatgcttggtttagtaatttttaagttagtttgtagtattgcatcagaaaacaagtcataaatgcattttatttttttgagacggaatcttgctctgttgcctaggctagagtgcagtggtagaatcacgactcactatagcctcgacctcctgaggctcaagtgatcctcctgcctcagcctcctgatgagtagctgggactacaggcatgtgccactatgctcagttaatttgtgtgtgtgtgtgtgtgtgtgtgtgtgtgtgtgtgtgtgtgtgtgtgtgtgtgttttatagagacacggttttgccatgttgcccagactggtcttactcctaggttcaagtgatcctcccacttcagcctcccaaagtgctgggattacaggcgtgagccactgtgcccagcccataaatgcatttattaataatatttttgaaagtgcttagcataatgtttgggatatatagttaggtttcttaggcttttaataaatacgtttttttaagttttctctaactgaaggttttgtttcatccagatagcatatagtatggtttgtgcatagcactgcaaaaaaaatcttattagtcttttaaaaatcgtttagtttcatttttgctttctattatatccactgactaaacgctctctaggaatctcatgctatataaaacacaccttaaagcagagagacagaattctctggtatttcttcaaaccactacataaattaattggtcaaattgagtacaaagcctcattcacccaatactttccatataaatattttgttttaccctttacttgagtttagatatgactagagacctggcctagtaaaattaaatattttttcatttattctactcttttaaacagttctgaggatattaatatttctttcttttttaagaatcagactcattcactaagaccttatcaaacctatttatcagtattttccccaaagaaattaaaccttcagtgttgtgaattctatcgtccctgtgtagttctgatttggttatttttcttcgctccctgagacacctccttggctccaactctccacgtaactattgttattggaagccgtagtctattttcatttcttttcacactcatacatattcactcaaccctgaggctgastcagaaagagtttgggtcactctttttttccagccatttgttggcctgctgatcgttcattcagttggcaaacctggagcgtgtaccttgtgccacactttctgctcactcaaggcctcagagatgaataagggagcttggagtctaatccacttagccactgcttaggtgtacagtttcttgtatggcacatggcacagtctgtcatggtttgagtgttaagaagaagaatcaagcagtggttgcacagatgtcttgttccctctttctcggtgatagtgatgcctcttggggccccatttcacagagtggctatctggtcattctgacctcatccgaagtgtttatctctatcagatgatctgtcctcagatctcactgctgcatattctggtgccttacctaagtctttatcaccaagagaaaagcttccatatcggacccaacccagcctttagatgctgctctgacaatagcaaaaagggcacaaggagtgagatcgcatgggcagaagtctgggggaggaatgccatctcggtcgaagagggagctcatgggaggttaaaggcatgaggattgagtggaagaagacataacttctttgggaggccaaggagggtggatctcttgagcccaagaagacataacttctttgggaggccaaggagggtggatctcttgagcccaagaagacataacttctttgggaggccaaggagggaggatctcttgagcccaggagtttgagaccagcctggccaacatgctgaaaccctgacactactaaaaaaaaaaatacatatatataaatacataaaaattagctgggcgtagtggtgcatgcctgtaatcccagctactcagaaggctgaggcagaagaatggcttgaaccagggaggcagaggttggagtgagctgagattgcaccactgcactccagcctgggtgacagagcaagactctgtctcaaaaaaaaaaaaaaaaaggcataacttcctcagaagtctcaaatctgtgggccccagactgtatttatcacacaagtatgttttgyttgtgctacacagaattttttttaacttaattgtcaatgctttaaaaattagggaatttcacataaaacccaggtttccaatktctttggaaaaatcaggtatttggtaggatatgtcaaatgtgactgttacaggtttgtggtctaagtgactggaatgatagagttgccatttcctgaaataggaaagaacatgggggaagcaagttcgtaggggtagggattggtcagaaatgaacggaatgtattaggttttagatgtatgaagtctgaggtgcatattagcatcctagtgaaagtatgaaatagctaagtagagataaaagtcaggagctccagagagaagtctggaacatatgagagttgtcagcatataaatgatacttatagtcacgagacaagatgatgtagccaagggagtgattatcagtagaagagtcctgaggattgacccaatggcaggaagataatagggacaagagaatagaagaataggaacaagagacagcaaggcaagtgggaactcagggaagtgtggtattgcagaagccgagcaaggaaaatgtttcaaggaggaaggagtgatctgtgtctgtgtcagatgctcacagatatgaggtcagatacaagacaactgagaattggcactggatgtggaatgtggaggttcctggtgactttggcaagaggacgtctggtggagtggtgggggagaaagcctgacaagtgggtccaggagactgaaggaggagaattggaggcagtgaatgtagacagctcttctgaggcatctgctctaatggggtggcagctggatgggaatgtaggttcgagagagggcggtggtgattgttgtgtaaagatagatgtcaccacagcatgtttttgtattgataggaatgatgttgggggtggggacaatgcagaaaactgtggggagatgctggagtgatgtccttggataggtgaaaggggatggcacctagaacacaagtggagagactggcttcagataagagccaggacaggccgggcgcagtggctcasgcctgtaatcccagcactttgagaggccgcggcaggcagatcacgaggtcaggagatcgagaccgtcctggctaacagtgaaaccccgtctctactaaaaatacaaaaaaattagctgggtgtggtggcgggcgcctgttgtcccagctactcaggaggctgaggcaggagaatggcgtgaacccaggaggtggagcttgcagtgagccgagatcgtgccactgctctccagcctgggtgacagagcaagactccgtctcaaaaaaaaaaaaaaaacaaaaaagaaaaaaaaaaaagagccaggacagtttatccttggtaacatgaaggaaggcaaagtgtatgggcacagatgcttgtaggcaggtgttatgttttggctgaatgaatgaatgagcaatcagccaatagaggctaagaatgacatgctgcctccaggagagtctccctagtggcctggtgttgtaagtccttccctgacctggtctgtgaagagaggccagcctagaagakaatgttgttgactaggtcctagtgtaggttattaaagtctgggttcgagtgctgacattgttctgatttccagggtattattgggaggattagtttgcaaggcaaagaaattgggtgggtgtctggtcagttgtttgctgggggtagcagctatcttctagtgatgggatatgcaccctttgtgttcctcaggccccacctcagcaagtccattcctcctctccatgatcaggcccactccttggttacttgggtttgtgactcctaacttagattgtgagtgcgtgagagaggagaggtgtgcagttggttgtgggagaagggcttgtgtgtggctctgcccatgtgggcaagtgagtctgagaaggtgcatgagtgagtcrcaatataatagagaacatgagccacagaagtgggcaagaggatgcttgacattgctgccaygattcccagagaagtgtcgcacaagcagtgccgtctttctcggtatctgactgaacaatgcacgtaaagagcttagtgaggactaaaattgctcctgtgtgtgctgtcataaaccagttccttttctgttctaaacagttctgtagtctcatccacatgttactggctgtttctcaactactaaactagtcatgaaaattctatctgatcttttggtaacatcaggtcacagggataattttaacggctcacataagcrgtattattgctggcttgtgttcaaactatgtcttgtgatctggacgacccttttgagattctatcaagttaaaattagaacatttattttaagagatgtatgcaagctgagacaaatccccattactgggtcagaatgaatggctctcagtaatgtagagacaattgtgacatgtacccaaccttttttttttttttaattcctggctagtagtttagtggtaagtcagggagtgagtcagtgaatcttatggttatccttactctgggttgaggtcagttcaacgctatcttctgacatcaacatttccccttcttattcattggtgaagtattttgcttttatttatttatttcttttatttagggtttttttttttttttttttttttttttttggagacacagtctcgctctgtcacccatgctggagtgcagtggtgtgatcttggctcactgcaacctccgcctcctcccaggttcggttcaagtaattctcctgcatcagcctcccaagtagctgggactacaggcacacaccgccatgcccagctagtttttttttttttttgtattttagtagagacagggtttcactgtgttgcccacgctggtctcgcactcctgaactcaggcaattctcccgcctcggcctcccaaagtgctaggattacaggtgtgagccaccacgcccagcctctattttgtttttagccatgcaatgtaaattctgactaataactgctggttgcatttggtgggagagagaaaacactagaaaaatattctgggttagccttttaagtgttcccctaaatttgcatttaggttaacttaagaagtagtttctccttttacttatgacgtttgcccttacttcattttggtatggtaattctcgattttcataaatgactaaagggtaaattgattatgatagaaaatgatcttttaaagacatttctcagagaacgtaattgagacataaaaataattacttgaaattaatatctagattgaaactctagatatgaaaacagactagtgttcaagacctgttgctcattctttttgtgtatgatgtgtcttatgaaagcttatagagcaagcccttcaggttcctttgctgtgtaaataactgtttagttgtacagttagagcataatgggagttaaaaggactcctgaaccttcatataaggtggccattgttsggtccaggcagagatccctcatatcaagccaagtgctgccctagatgagttctaggaacattcttgtgatatgactgccttacacaaagttgcaaaatctggcttcacttctctctcaccctcctatccaagccccatttttcccccacttaacagctgccttatttctcacttttctgccctcttcccacccccaaagggctcttgggctggtctaaaccttccgtgttcagtgacttatccaggcctgctcttctcataaaaagctggtcctctaaaacctctgaccattcactaccactatccatttccatagatagtaggtgtgtaacagtttgattaaagtagtgtcaggccgggcmcgtaatgtcaggcccacacctgtaatcccagcactttgggaggcagaggcaggtggatcgcttgaatagcctgggcaacatggtgaaacctcgtctctacaaaaaataaaaataaaataaaaatacgaaaactagccagtcatagtggcctgtgcctgtagtcccagctacttgggaggctgaggtgggagaattgcttgcacttcagaggttgaagtgcagtgagctgagattgtaccactagactccagcctgagtgagagagtgagacactgtcttaaaaaaaaaaaaaaaaaaagagaaagtaatgtcaatacctaatgcatctaaaagcatttccattccttactggacagaaacagggctgagcatacctatgatatctgaatcctttgcgtgatttctgtatgccccagaatctttcttacctcctcgctcatgcttctctgtgccttcacacttctgagtctgtttcaagtttgccactcagtaaactggccccaactaatttgtaaagaaacctacttacatcctaacactttgtgatttgtttcattgcaatgtgggtagctgttgggaggctacatcactgtgcagtactgccctccacagtcytgctcacctctcccatctctccccactcaccccctgtcttgctggcacccaagggatttcttgccttagggcrgaaaaagcagtctcacccacatttaggaccccttaagatcccagtttctactttaaacagccttaccaagggatttcttaaaatgaaaactgccctgtctatgaaaggactatccagtggatacagttttttcactttgttagggtagaataggtaaagaaggtaatttgaggaaggaggatccttcccctgactacagggagtaacagatttagaattaaagagatactcagggattcatgaaggtagagatcagtgcctgagtcacagtgaaatgcagggtgtggattgtttccaaatggtgttcttgttgacattcaagaggaaggccacaggccatatggagaggtatttaaccggcatggagctggtatccaggagggctgcagaatcctcttgaaccagtcgtgtggcggtccagagccatgctgggatacrgacagagccagaggctcaggtgtatattcttgcctgcagcagagggcagtctgtgtgcaggtggattggaccattgtgcccttcctctgcatgagctctgacacccaaatccagagacaggagctggggaggcccttagacaatgtccagcacagtctacttgtgggtcacctgctgatcttaagcaccacccatttcttgttgttattccattttttccttaacctctgttgcaaactgcatccttctgaaaagtctttcttcagtcttcttgaatgctaagttgcttacttcataatatgctttcctattggttactttctgttgctgggaccttaactatacttgggggattgccaggattctkaggcatacctttttcactttcaaattaattgtccataggcaggagttaatccataaattaacaaacgtcactctcagacaatacccttataattctgggaatgtcttacaatagcagcctagtcatggctaagagccttggctctgcagccagactgcctggatggaatcccagccttgtcactcaccagccatgggatcctggagaagttatttaacttcttcatgccttggtttcctcacattgtcattttggagattaactgagtaaaccaagcaaacactaaccaatgcctgcgacatatgaatactttatattcttattatgagctcttattattactactgcttagtcattagtaaactgtcaagagagcaggttagaaaagaatagtttacactatattcatgttttaacttattttaattagtattactatcatgttatgactatgtatgacatttatattaagtctaggcaaatcatgggcggaagcttagcagttaaaacaagaggatcaaacagtttaatacaagaggatctaagtaggtgctgtgrctccaggccgggaagttgagtcaggaggggtgggcgtccgaggaggtggaaggaatatctcattcttatgtactctgtttcggttttaggcttatgggtttgtattgctaggatggggcagtgccttccctccactctgcaacacaggtgtcagatctctgtggtgggttcccccatcctcattagaacatttgttgaaggcagtcatctgactctttcccatgcattgtccctgcccccacttcctgcacaaaaccacctctgaaaatcccacctgcattcattactttggaatttcagtagcccttaatgtcagtactgccctgatagccccaacttgtcaccttgcttatttttatgcagatgacccatcttactgtttgaacaaaagccttttggggccacacactgagcatagtgccatatgcataatagttgttatttaatcgatagctttatctgtgcacaaatttgggcattatgatttttatccttttaaggattaaatagagcaagagtgttgtgtgtgttacatatacttacgtgtataaaataaagagtaagcttggggatatcaaatatcctcttcatttatcagaagaaacaaaccgtggaatgatcaattaaccttaagaggaaagagctttacaaataggctgtatttttcttgcatgctttttggagcagcagcagcatggtaggatggtaagtgctcatgccttagaggtaaaaccatgtcaaaccccatctctgccacttagttgtgtgaccttgggcatctcacttcagtctctcacagcctcaattatcacattagtaaaatttaccttgtagaaatattattattccccatcatgyccttaaagaatttggtctccaaatatagtaaactctgatgatagctttttaaccagttcctaactttttttttttttaataaactttaggggataggaaaggttacacgagtttgtattattttgaacggtatatcatgctcaaatatcttggttgcctgtaatataaatctactgaaatctaacacttgagcccagtacctgaggttctgtcccattttacttttctttccctactcaaagcctcctctctggctctaacagaggatacctggtctagcacacaggtgctcacctgatacctgccattgcctgtctggaattccctacattatcatcagctacccagatcacatctgctgtataagcttgaagtcacatcccactatcttagcacctctgctcccattgaagctggatagtgcccttcctgctgtgaattcctgagcacccactgttcctatttttgctttgacacttgttacattcacgtttggtttttgtttttatatacatagatttcctgccagctagaacaggactacgctttactcctacttttttaaagatattctttattgtgaaatggagcatatgtacaaaagaatacatattttaaaatgtgcattgtttaaaaataccacccaagttaagacatagaacacaaccagtgccttagaacctctttttgtcccttcccaatcatagcttcgcctttcccccagaggtaaccagcatcatgaaatttatattgattatagttttctgatctttaaacagtaccttttttcttgttttgccttttttttttttttttttgagatggagtctcactgtcaccaggctggagtgcagtggcgcaatctcggctcactgcaacctccgactcccgggttcaagggattctcctgcctcagcctcctgagtagctgtgattacaggcacgtgccaccatacccagctaatttttgtattattagtagagacagggtttcaccatgttggccaggatggtctccatctcctgacctcgtgatttgcctgcctcagcctcgcaaagtgctgggatgacaggtgtaagccaccgtacccggcctgttttgactttatgtaagtggaatcatatatatgtaattgtttgacccgttgcctttttcaacagaaatgttttaaaaattcatctttttgctgcatgatgtgtatagctatagttcattcattttagattgtattccatgctgtgaatatagcagaacttttcctttaaaaaagatggctatataactataaaatctcagtcatattcaacaataagcaaatatttcttacatatatgttggtgggttggctaggacagctctgatgatctcagcagggtttggagctaggctacaggtttggtccagatctgttccatgtttcttttttctggaaacagcaagcacccagggcatattctgctggcagaagttgtaacttctcagagggtgaacagaaataagcaatgcttctgtaaggcacaatgtcacttctgctcatattgcattagtcaagtcaagccaagccataggacatgtccaacatcrggtgggaaagtgtcctccccctgaggaggctgggagtaatgtatacttgctgagcagaaatctaatacagacatttgggttgtttccagtttttgactatttcaaatagtgctggtgctgctgtgaacattttgattatatctcttgttgcacatacacaagcatttctttagggtatatgcttaggagctgagctgctggattgtacagcatgagcatttttaactttactaggtaataccaaatactttccaagtggtgtgcctgttctgtccacaatggattggtgcttcagtgttgcactgaaccgatgctacatttacattttttgtatgtatttaacacacaactgaataagtacttttaaaagtatctgtctcacaatgtcacagtgaactcagtttgattttgaacccttactgcaggatggaaagtacactgttaaagccacagaatagggaggccaaggcaggagaaatcacttcagggccgggagttcaagaccaggctggacaacatagcaagaccctggctctacaaaaaaatattaaacattagctaggcatggtggcctgtgctactcaggaggctaagggtgggaagttagaggctgtagtgaactgtcatgctactgcactscagcctgggtgacagagtgagacactgtctcttaagaaagaaagctatagaaaagtgctactaagtgctgcttatctttttgtcagtactcagaatccactaactgtttcaacttgcgttcacttggcaggtttggtgcaagtgccaaagttgtgcatttcctgggacgagtcaaaccatggaattatacttatgatcccaaaacaaaaagtgtcaaaagtgaggcccatgatcccaacatgactcatccagagtttctcatcctgtggtggaacatctttaccaccaacgttttacctctgcttcaacaatttggccttgtcaaagacacctgctcatatgtaaatgtggtaggttctgtttcttttcttcagatcatttaatgctgctttttaaaaaaattgttgtatcaatagagatgtggaatatttagcagcattttaaacaaagagataaataaaattttgtggaaagaaaacaataaccatcttaggagaaacattaccagcaagaagtagcagaaataaactgtgtggcagatttctttggatctgagaacacagttatttagaattttctgtatatacccatatattttaactttagaattcttagcccattctcctctgaaaagattttgagattattcctaaagtagtggtctataaaaacaacaccccattgaatgttttaggaactgcaaacatttagatgtatctactttatatttgccatctgcttagaagaatgtgttttcagtgaaaatgacaatatgaacatacagtaaatacttctataggattgtttttatttcctatgtttgtactcctatgattactataggatcttgaaaaagaaatatctttgtaggaggcagatgacatgttaacatttataacaaccctctttagcatcttttctgactttaaaggtcttctctgaggtttgttcttatgaaagaattggaagaggatgaggaacgaaactgttacatattcagatataaataagagaacagaatggtggtgaattataatcagataatcagctaatcacctggctgtgagattgtaatattataagagattattctctttcctgtggtatagattttagcctgaaatttcacttactagcatttactaagatatagaaaggagaaagggagaaaaactaacacttgcattcttactctgagttctttatatggatcatgacataatatttgtacagcagtggtccccaacctttttggcactagacactggttttgtggaagacagtttttccatggaccagtatgggggatggtttcaggataaaactgttccacctcagatcatcaggcattagattttcataaggagcacacaacctagatccgttgcatgcacagtttacaatagagttcacgcttctatgagaatctaaccacctctgatctgacaagaggcagagctcaggtggtaattcttactcgcctgccactcaccttgtgctgtgcggcctggttcctaacaggccatggactactgctggtccgtggcctgggggttggggacccctgtcatacagtacttgaaaccacctggcacatagtaaatgcttaatgaaagttagctattcttatttaacccttaaaaccactatattaagtactattagtaagtattgttaagtatattaagtattatatctccttttataggtaaattaactgaggcttaaagaagttatataacttgtcttagttatgtaatagactagtcaagcagcagaatgggcctcaaacgcaggtctgaagagacttatccttatgaaaatttgagatggactatgcttaaaagtagccatctacagcccagaattaagaaagtaccttttatggcaggtgaagggagagttacactttaaatgctaaactattttaagttatgtccagtatacttggcttgacctcaggggcctctcttttagggtrtaaattcacagcccccatattgtgaacagagaggactctggaaatgcctctgtatcattactgttgccaagtgcaaggcaaaggcaggactaatccaatggaaggacttccttatgttgcctcagctataatgcagtcctatacccaaacatcttaaagttccactgtatttaaatacatacctatatgcttacgtatatacgtaattatgaaccaaggaaaggtgaagatgggaattgaaagttgttcaaaactaagcaaattaacagaagctacaagaacagatgctacttggtaatccaaatgaaagcttgaacaagcagagaagtttggtacctagtctcaaaccagtttaactttccttcttataatgtgataactgagtatgtgttgcggctctctagttagattctttctgaaatgtagcctgttgggtatcattttgtttaagttctcaacctttcagagcccacacagattgagaatttatcttgagacttgtgttcccttgcccatccatcttacactttctaatgaactgtttgcagctttcagacttggtctatacactggctttctcttgtggcttctgtagaaaggtatgcagaacttaaagattaaccctaattactttgttctcccaatgttttcactgagtcaagaagtcttcattttgttaggaaaaaatcatataatctatatttttgtgtcttktttgtttgtttcatgtaatacttttcagtttttgctactttgcatgatgattcatcctggcttttctgtcttcaatttattgcattctttaaaacagtttgattttcagctctcatagagtcaattatgctttcctttctaggaagatgtctcaggagccatatcacatctgtcccttggggagatcccagctatggcacagccgtttgtatcctcggaagaacggaaggaacgatgggaacagggccaggctgattatatgggagcagattcctttgacaacatcaagaggaaacttgacacttacctccagtagaaacactgcatttttctgtgaacacatccacttcacaagccttgtttctgatacttagtatctagagctgggttgagaaaagtctgttacrgttgctagaggttttcattaaaacttatcagatgagaggcttttttaggataagaggtgagaactgggcaaaagttgtgaagcagcaattctgttatatggacagtgttctgctttttaatcctatttagcttgtttcagaaattctcacttttgttgactgccaacatacaaagtaagggaaactcaagatattaagatggctgtatcagttcttaaaatctgcagagcctggttcaaaatcagtcactcccttcagaagcagacatggcatctgttccttgcttgcttgttggttgtgtacctttcacgagacctgaattttagaattgcccagtgctgccagagtgagtgagtgtaattctcctttcaggtaaagataggctatctcaacactgctgagtgattcataaacatatcaaccartagcattaacccattttatttcctgtccttagtgtctgaagatgctcaccagttttctgtgtacagtaaggcagcatgctaaaatgcttttgttcagttctgtatatttgaaaatagcagtgtgttctctgatggttacctgcagtggcaccctgtacaaaaaataaaagacttattgctgtatcttggttgtttaattaaattaaggaatttcaccatacacccttgaacaaatctattagggaatttttcacaatttttggaatttgtcatagttttaaaaaagtgtaaagcttgacattgggatatatgctttaaaaactggtatctatgatttcaatctaattgtttttctgtgatggtgatggatctgacagatcagaacaaaccgagatcaaacttacatagtgtcatccacactgcacctctctattaagtgggtatttagctatttagaatattttaaccttaaagtcattcctaactgtcagaatcaatactgggtccagtccctactagtattttatctatgatttaaaatgatagaatggaaaagcgtatttattaaatttatagatcattctaggttgtaagagatggcaagctaaagaagggtaggatccaagatgaccttttaaaactaaaatgagtggtcagaaatgattctatggaagaaaacaggacagttaaccatgacaggaagaaactttagaggtttgattgggcaaaagctgcaaagcttttgtgacttagccttcaaagtcaccctccttattcatattgatgtgaattaatatacaagcatatagacagcttaagtcaagaatggttggggccaccttgaaggctgttaccataggagctcaataagaacctgaggatttacctagaattataaaatattaaatgataaatgacttctgaaactagctatttggactggtgaagaatgagtcgctattgatcttcaagtacaatgaagcatttaccaaagatttatttaagtgcctccatgtgtcagatgctgtggtacaaagaaggacttctcaaaattttagctagtcagaggtctttctggcttccgagtccctggttaagatgaacagaaacacagtcttcagatataaaatgtcttatttttgtggccattcagttgcattcaacgttaattttttctatttactaccgttcattctctattttttacacagtagcataacaaagctctaaggtggaaaagctgacatagttttaaatttttttttttttttttttttttcttgaggcagagtcttgctctgtcagtcagtcaccaggctggagtgcagtggtgcagtctcggctcactgcaacctctgcctcctggattcaagagattctcctacctcagcctcctgagtagctgggactacaggcacgcaccaccacgcccagctaaattttgtatttttagtagagacaggtttcaccatgttgccaggatggtctcaatctcttgacctcgtgatccaccggccttggcctcccaaagtgctgggattacaggcgtgagccactgcacccagcaaatttttaaatttcaaataagtagtgaaggctattattaacttttggaatcagaaagaatgacaagcttaccataagacatagcatataatgctgtcaagttatttggctagaaaatcactgaactaaacattcttttccttctatgatctatgtcttaaggtgaagtattaactaacttttccatgtaaagctatacaaatattggaaaatcttttctagggagtccagaatactaagggttacttagtaaaatgtataaaaaggcaacagtaattcaaattacaagatttatatttgcagaggtgatccatatatacttatccccttgcagtggctggtatgacctttggttgtaagacaaacttgcccacaacagaggtcaaatccatgcctttggagattagctccatggtggatggagctatggtttatgcataaagtaaatgtttgtttaccttaattctccttatacccatattgtcctgctgtataacacattttgcagatattttgaagttaatgtgttaaaaacttgaggttaaacatttgagtttttgttaagagccaaacatcaaatgtgcccttatatttttaatgaatctcatccaaatgctaatgcataaaccttgacaagtagtataaataaaacaagaaaaaaatacagcaatgtctttgccattccccaaaacaaagcacacactgccgaagatcattagtactcactggtaacaaactacatagggttagtttgtatttccaattctagagctgtaattttaaggacaaaatgtacaatgattgattaagagtgctatctgtgtatatataggtattatcacaactcctttttttcttccagatgaagaaattaattgggaccaatgtttttagatcaaggcattttaaataagcactcttgatttctgaacaagaatttcaaccagctaaattgagcaaaataaagttagttaggatatgaggacattattctgttacagtaatcttcatgtactctcaaaaaaatgtaacacttgcatagaaatgtcacaattaatgaaggattttatttgaagataaagtcaaaattatggcaccgaggaaggtaataaacatttgaaatttttattgatttttaaatttaaaatccagttttaaccacaaaattgtttgaatcacaagtggtaatacaatgtcttcaatatttttctaaagttatttttctatataataataagacaacagcatagcatataggaagttttcattccagtggcttttttatatatttatccttcttaggaaggacaaattaaattttttaaattaaacttttaaaatataacaacatctaacagaactgtacaaaacaaagagacattttttaaacaacttgccaaacttacttatgagtgtgttttaaaaacaactttgtaaatgtctgggcaaagaagcaagctgtcctccctttaccttcatagtgagtttgtaaggctttgtctttgtaagcagaaagagtagactgtgttgttttttgccaaaaactgtttatacttaatctcactgaagtattgctatatggagaacccatactctgatcaacttgattttttgtgtgtaatgcttgatctaccaggtaacttcccaactgctcctaatgctagcgggctaatcccacattattattccactatcatccctgcagaaaggtcttggttttgatgaaaatcagccctttccttacctgctactgcctcaaaaagggaccaggaagattctagctggctaattcactgttccctttgagcaagaaaacggcacagggagaaaaggacttatctggtgagagatttggcatataccttcaatgtgtgccctataacacaacattgtctccgatctcatctttctatcaaatgacttccaacactcttaagtctcaggtattcttaaatctgtatcatcaaacatgaagcttctcttgtttgttagagtaattaatctttctttggattaaagtttccctttgaaataaaaccacctacctaatctgactgctaaatttctagcttctttgttttaaatatgctcaggagtcaacccaaattctgcagcaaataagtttgcttattaacaaaaaagtaaaaaaaaaagaaaagaaaaaagatgactaattctacagatagctgtaaggatgaattactcaagttcaaaatcaaattctgattctaaacacataacaattgtttacattcaggattaagatgtctttaagagttgaaacgactttggagatcatccagcccaacttccatccagatatcacgcctctcacatatagtagtcttctgaattataaaaatttataaagttacttccaaaaaaagctacataaataaaaattatctatttatagaaatatctatttagcagttccataatttaaaatattcaaatcaaattgggtaggactggtttgcctctcactcccacagactatatttatacctcagacacagcaagttacatttaaacaatgagtgtagtactacttaactaaaatggaaaaaatagtactcttaacataatccctaattttttcatgaacataaaactccaagtcatttatgtgaactatatctcaatgtagctgtaggaaaaataaaaacctgtgctaacctggactttggtctcatttaagatttggttctggaatgcaaatatggtttttgaaagcccaataaaattaattcttgtatagtctgtatatattgtttacaaggactacaaacactgcatcacaaatcggaggctttggtaaataactaagtgtccaacatagaaaataactatttggtcaaaagtataaaaggtctgaccttatttgaaatacgaaaaagctgagtacttggaagatacgtgaaaatactcagcatagatattatgaaaagctgaataacaaagtaaccttttttctcaaattatttcaggccacagtatataacggaacttattgctatttgaagtttcattaaaaataggttcatatatagaagaaattgtgtcagtaatacctcttcactaatataaaatatgccccttttagaagacgtgttctctagatctcatttctaaaactctgtatttttctcatttctaaaacttaagtatccaatcaaactgaccttactaaaatcccacaaattataagtcaattaatgttctgatttcattaattttggcttgtttcatttcgtcagcatttggttttttagttccaaaggctcctgctgcaagttctctctttttgttttgtattttcagcatattttcttcaacagagtcctttacaatgaactttaaaaagaaaaaaaaaagttaagtagtttttaaggcatagtatttaaaatctttattaaaaaaactaaatgaaagatttgcctaatggcaaaaaccgcaattacttttgcaccaaactataataactatttaatagaactgaactttgctttccttacccaatatggttttcttatataaagaatatggctgtacgaatagaagttacagatcacaagataagcaaagcaataaagaaaaaaaaagcaaactatataggcaactctggcaaaatgacttcagcattgtattaaaaaggccattctggccgggcacggtggctcacacctgtaatcccagcactttgggaggccgaggcgggcagatcatgaggtcaggagatcgagaccatcctggctaacacggtgaaatgccatctctactaaaaaatagaaaaagttagccgggcatggtggtgggcgcctgtagtcccagctactcgggaggctgaggcaggagaatggtgtgaacccgggaggcggagcttgcagtaagccgacattgcgccactgcactccagcctgggtgacagagcgacgtctcaaaaaaaaaaaaaaaaaaaacaaaaaactattcccagaaattcaagaatgaatctttagtataattcacaacactaacaaagagaaaaataaaacgtgatcatctcattcctgataaaaacttgattttaaaataccccaactaggaatgaatgtctcaaccttacatatttaatgtgaaacaataaaagtattctacaacaaaacagaaacaagtcaagaatggtcactatctgctactatttaacattgtttaagaagacccaattactgcaataactaaagctatataataaaattttactgaaatacatataagatctacataaatggagaaaggatactatgttcctgtatggaaacattcgttacttataaagaaagatagttctcgaaagtaataataaattcaataaatctcaagatatcttaaatgggattttataactaaaatctaaagttcaattcaagagcaataataataaccaccaatacaattttcaaaaagggtaatcagaacattttaccctatcaggtatcaaaacttactttaggaaaccatagttgttataagagtaatactgccctaagaaaaggaaaagagatcaatggaacagaatagtctagaaaaagacccaagtaatatatataaattagtttatgatgaaagtgacatttcatactagtagggaaaaagttggaattttcaaa

SEQ ID NO: 97660 - DNA, 479168 bp, Homo sapiens
tgattggttcagactgtaatgaaaaagacccattaacatctttaagtactactgtaccttaaaaatatccaggattttaatctatagtaagaaatccacatactttaaaagtgaatgtaaaattttaaagtccttttgcatctggctcagtagaaaatgaatgtgctgcatatttacgtggtgttatttaactctcaccatgtagggagctaaaagtgttatcctggatttacttacataatcttatccaccttttttgggatattttaccactaaaataggctcaacaatgttgatgtgttcagtatgtggtgatccaaaccctggcagccactagagccacacaaatccttattatgcaaagcccccactcccatctgctcaatagaatcttcataccaagaagaagagtgaaagaggctaaaactttccatttacattgagccaaaacatttaaataagacaattaatcgtgcttcaactttgtctggaggaggaaaaacaagattttttatttcgggagaaacaacagcaacatgtagtgacagacagctgacaacctgattccaagggaaaattatttttaaaagcaaggagggaagacatacaaacagagatttcaacagttcctgaacaaaatacagacatagaaacaaagataactgatattcaaagtgatgactctgagtaaaaaaagactaagctgacagaattttaaaagatagaaatatatctattaaaaagaacaaaacaataatgtttagaaacgtaatgggtaggtttagttagacagaaaaattcagttaaggtgaaccattcctttccccgataatgctgggtaaatgtacttccactgtcacctttacccctacctgcatggagaaatggtccactgatgtgactaagcccagaagtgtttggtttctttttacttaaagttccttcttccagatgagagtcacgtctctgagacgaaacaaggatggatagcctcgaaggcttctttcaagcttctgacactaagctctgaaagttagcagcactcagcaatttggtactcactcatagaagtcaaagaaaaaaaaaaatttcaaaaaagaagtgtcaggccagggatggtggctcatgcctgtaatctcagcactttgggaggctgaggcaggcggatcacctgaggttgggagtttgagaccagcctgaccaatatggagaaaccccgtctctactaaaaatacaaaattagctgggtgtggtggcaggcatctcccagctatttggaaggctgaggcaggtgaatcacttgaacccgggaggcagaggttgagtgagtggagatcgtgccattgtattccagcctgggcaacaagagcgaaactccttctcaaaaaaaaaacaaaaaacaacaaacaaaaaaaacaaaaagtgtcaactggtgtagagaaatgaatttgatcatagccaactacatactacacaattttttttttctaatttattactatttatagaaaaatctttaatggcctacacgtttttcattctgtcattttcccttctttccttgaagtagagtaggtgaggaaaagggaatacaggaagaaattattactccctttccctttagaatacgagatccttaaggacaggaactttgtctattttatttactgctgtatctcaattgcctagaacaacacctgtcctgtagttggaactctggtatttgcttgaaggaatagctgggtcctgtaaaactatcaaaaagatggaaatgtataagaactgtttgaaaacatatgtaacgtgctttaaaaaattttttaagatattttatttatttaagctatttcaggctgagtgcagtggctcacacctacaatcccagcgcattgcgcggggggacaaggcgggtggatcacttgagcccaggagttcgagaccagcctgggctacatagtgaaaccctgtctcttaaaaaaacaatttagctgggtgtggtggcagatgctgtagttccagccactcaggaggctgaggtaggagaatcacttgagccttggaagttaaggctacagtgagccattactgtgtgagtgcacttcagccttggtgacagagtgagatcctgtctcaaacaaaaactttttcatatatactatgaaaacaaaaggtattttattcatatatattatgtattgagaaaactggaaacttagtgaccacaatagttccaactatagctaacaaaattgtcattagtactaatgatattaccttataaatccactgatgaactgttttctcatttaattcattcattaaacaaaacatcattaagttcctatcatgtacttggtactattttaggccagggaatccattggtgaatcacgtgaaggaaacaaaaaggatacaccaattttctaaaacagggggctagagaagcagtagagagtagtaattaaagagatggactctggagccagactttctgtgttcaagtcctggctccacaactcattaactgcatgctctaggacaagttacttaacctttctgtattatttccccatagtaaaatggagataataatagcaattacctaacaaacagagtagttttaaggattaaaagagttaacacacaaagcactaagaacagtacgtagtgagtatttataaatatcatcacagaattttcctctaaagactttaatagcctgtggttttctatttacatttctgttgctctgtattaggccatgaagcgctcttgagaacagtctgtctttgatatggatttgcatttccacaaaaagtatttgttgaatgaaggaaggttagggtataaagtatgaacagatactacttcaatgaacagcaaactaggataagaaaaggggggctgaagagagtgaagatcactatctattaagtttaacttcccataaggtcacctatatggttagaataatgcagtcaattttagtagctacttaaaaacatgttcacagtatcacagtccttagtgaaggggttgtggccacctaatgaacagttaattccacctcagcagttttcttctgtgtctttggggaaattactttcccaggtaggtaattccatcttattaatggtagtatgaggcttagtgtttgaatgtctgaagatgaaacagagaaagaaaagtccatgtatggttctttctgctcttctgcaacattgcagttgaaaagcaggagggtgggagagtcctgctgactttcacaatgttatagtgtgaacataggttactattctttgctcagatatctgggcagtctgccaaggtccaaaaaaggaacgtctttgctcttagcagggcaccaatgactttcctgcagatgcaggctctgtgctaacttctcagctataaagattgaatttaagtgtctgttattccacagacagagccacatatttctttttcactttcaaatttatatatatttctaaattacatgtatttctataacacaaaaaactaagcagtaccatttagattccttcatacagtttattttgctgtcactccctacagacaacaagcaaagaatcctccgctttgaatgagcttacagaagaaggctcttttctaactctgtccattcacacaccctcctgagggggcagggaaattgagtcatgtgtgagtttgctgtcagttccagcaaactgccagacaaattcttcctcatgttctgtctctgtgttatctggcaccccagtgaccttccaacggtggggccttgctagggaaactagctaagaatctggggcccaaaatctctgtgaccttgggaaaattatctgacctcaccagactacattataagagtagataatataatctccaaattcccttttaattctacaattccagtattttgaatggcaaggaataaagctatcaagtaatctacatgctgataacatatttgagtttgtatatgcagtatgaactggtaacttcatccggaatctcagctagtaaaaataagttttcagggagttgagtacactgtctctcccccgctgcgagacctcactgcggtggtccctataaaaataaaaattcagaaagacttggtaagtgtaagacacaatatagaaaaatggcaagagtgtgagactcttggagcaaatcacattctctctgggtctcgataaactcaattttaagatctgaagtggggagattcgtcaagatgacctttaaaagatcccattcagttctaaaagcaaaaagtccaaggttatcagataataagtacctctgctttctagctaaggttattaggacagaaactaccgaaaccataatttaaatgactaattatgtgacaaaacatttaggaaacctaggtttaacacctactggaaattagtagctgtctccactggccccgttagacaggcagagagagtaatgcccttgccttgaaaacgtgtcttttcaggttctgggaaatttccaattcattcaaacatttctccacattctccagccgttttagtattttgcagataaagtaggaaaaacagtcgcaactataaatacaagccattgtattgatagtatgaagcgatttctctgagtttgatgacaaatgtcaccttcaagcagtacgcagattattcctacgccagagttccttcaccaactctccccctccccctctctttcagcagagacaagcgatggagatgcaggttacccaggtcttccatgacaaaatggttactctgttacatttaagagaggtgcttctggaattcacaatatacagttcaataaagaatatttgcagtagttatttggttagtgatgctgtcacttcaatatatcctggcattacaaaaaaggtcaatgaacgggttccaaataacattttgagaaattagatatggcggaaacacgtctcctgcaaacgcagatcgtaatctggagcacctggtaaatactacctttccagctttttgctttcaaggtccctgtgacaaaagccgttataaacactgtgggcaaatgaggagaaaaaggggttaggacccaacctttccctcccatcgcaaaccttatcgtccttatcaaacaccgtaacgtcctttggaaaatagctgcagcgtcgcattttgtcctcccgtcatgcagcaggattaagatcgctcctctcccaggacaactacttctccagagtcctcctaagagcgccccataccccgcaaggtggaaatcaatcccttcccattactgggtcactgcggcaatccccagaagatgagtccgagcttgccaaagggcgcgaaggacagtgccttgcacagctgcctcccaaaagtccctaaagtgcaagaaaccccactcaagggcgcgagggccagaggtgggcaggaacccggggcccacactcaccatgattgaaaactgcggggacaatttcaacaactgcaaaatgagcctcagagagtcaggtcacctctaccgcggaactgactcggagagggcgagcggtgttagcgagaaaaggctccgctcccgacgcggcgctctctgggaactgtagtttacgctgccctggttgtggcgcaatctccaaagcatttccttcaagtgttgaactacacttcccgataccagaggtttttttcaagctcttctcactgcgctctgcgccgattgcaaagtagtccctgaggatgagcccctgtgattggaggacgacaacaaacggatggtttgggctcaggaggaaaggacctgcctgatggagcccggcaattggcgggagagatagcgtgtgtaactctagggaggggagaatcaccccttagcgacatcacccccacgcgcgtgactgagactgcatcctcccatgagggtaaacgtgggaggtaaagagaccttccgctgcgtaaagctggatcgacccggaaacaaaatcttttaaaaaacgattgacactctggaggggcgggggaattgataagttgggacgaccggacagcttctcaggttgctaagcgacgaggcgggagcgcacgcacaccctggctgctttgtagcacctgaggaaactgtggcggcggcggcggcgtcctggagacccaagagaccaagcgagcgtgtcgctccctctcgggtccgaggacctagcctaggaaccttctgcccggggtagtgtctggtgatgaggcgagagttttgctgggacgcctactccaaagcggccgggagtcgcgcttcttccccactcccgagacaggtgagccctggcccgagggcaaggggttttcttttaaccttaggatccggaatgcggttggtgcgccgtcccgctttgcttttatccgctgtgcggatgcctgcaagctcgccggtcccttttcygagcggagtatgagggctgtgggaatgcagctattttggagggggtggtgccctggagtaggtgcacccccgaccccaaatggagctcttccagagttatatcaaaaatatttattgagcatttactttgtaggaggtgagcctctcccttccaggaggtcacagtatacggttctaatttgctctaagccctccgtgaatgttgagttttgtccattcccttttggaagaaacaggatgcgccttaaaccatcttgagtcttaaagttatgccaaacaggcatttctaaggaaagactggcgactgaaggggagacactggttgtttagtcagtcagtctcagctggtaaaacaacttaagaggttctctttaaaattaatgctgccaagagaattgctgtgctttttgaaagcttgtttcttgtggatgttaaaaggaagatatgatgctcgggagtagcatacacagcatatacgtaatgaaaatgaataaaacatctctattagataacattgttagaacttccgttttttctctgtcactgataaatgaatgccaagtaatatctttcaatttttctctatttcagtttggaggatttgctatttttggaaagaaatgtaatgctttacttttagcatttattaatatcatacctgaatgactctccttgtatctctttattcatttggctctcagacaacatactttcctggttttcctcttttgttactggttctcagttctgcggagtttctaaattttttttagttgtgatctcttaacattggggtgcctgtattctctgtctatactaaatccctcagtgagctaattcataagttgcatcacttcaaatgctacttttaatgtcaaaaactctcaaatttatgtgtctagtcctgaattagtaggtgtgcattattctcaaacctaggttctctgagttttactttttactctgagcagttacgaaaaatttcttccattatcctcctaaatgaattcttctactagctgctaacagaaagatttttccatgttgttgtccttaaaaatatcatgattttacctaatgtaaatgacgagttaatgggtgcagtacaccaacatggcatgtatacgtacatatgtaacaaacttgcacgttgtgcacatgtaccctagaacttaaagtataacaaaacaatctcatgrtttttgtcctcgatttacagtgaattttacaagggagactttttataaccagaattctcactgcagtcctatagcaggacaggacattcccatactccaagaaggccacaaacatgtaagcccccgtattcccatccagtccagatatacagaattgaagtcacctgtgtggtagttcacgggccttgttctgtttattgctagttgcccttgtaaatcaggttaaggagcatattagcactgattgtaagttacttttctcaggtaatataatacactgcaagagaagatgtttggtaaggtgggtatatcagcacatttccaattatactaataagattgtctgtgttctcttccttttgaaccgtctttggtaatagctaatgtcaagtagcacaatatgtcattgcactttcactgtgagtttgaatctccaggtggtttgtgaatgtgttgcagacattcattttttgttaaggcaacaaacagagcattaaactgttatgctatatttggagttatgcttaacattttttttgcccagcctcrcgttatttagtaaggtaatatttaattcaaattgtagaaaatgtttgaaataccattctaacaacatccagcaaagatattaaaggatcattaagtttcamatctctgaaatagaatgttggctcttgatacccaaggcactttggaactcacaagatcttatgcttttttatagtatacaattatttaaccacagctaggcgtggtggctcacacttgtaatctcagcactttgagaggctaaggccggaggactgcttgagtcgaagagtttgagaccagcctgggcaatatactgagaccttgtctctacaaaaaatttttaaaaaattagctgagtgtggtgttgtgcacctgtagtcccagctcctcaagaggctgaggtgggagggttgcttgagcccagtaagcagaagttgcactggcatcactgcaccccagcctgggcgacaaagggagatcctgtctcaaaaaaaaaaaaaaaaaagaaaattatttaacctcatattaattttatctctagcatatataaaattgttatagatctagttaaaactcattcatcttaatgttttctttaatgaagttctattacacttttaagctattttataacaattttgttataatctggttcctttttgttgaaagtaacaatgtaatatttagagagtactataatgtaaagatgcctttacattgctgtctgtctaagtagctacatttttagaaatatgtactttaccataggatcatgtatttagtaaacagccatgttagataatggagtgtgattgaaaataggattatttataaagcaaggttaagacttgtgaaataaatcagagaccaaattattacaaatattttttaaaggaaagattgcagagctaaatagttgaccttagctgaaaaaaaaaactttggctttttaccctttttaaaatttaagtgtaatgctaggtatcttggaaattatttgttggcttaagtgacatgcaggacatttttgaaagtattctcaagtaatttcttaaaatgaatatgtagtattttaaaaataattattacattcactttagtgaatcttaaacgtagtaattccaaatttagttatggcaaaaataaaagtgcttgtaatttaatttaaaactgtagtctcaatgagaaccactttattactatgtcttacaattttatacatacacaatttgtacacattttaaactataacatttgactggaattttcaggaatggtgaaatacaggatattttaataggataaaagttttaatcatgatcattaygtagtcaagttgctttgagtggtcaagtggtagaattgagtggaataatttgctaggacctcctcttttaactttagttaaacaagataaaacattattcatcaggattctgtttgataattacatgtttccagaagtatgagctacctaaccttgagtttttttcaagtgaaaggagcagaatttattggtcttaactttactacctagctgtgtgaccttgaacaagtttcctggtctctataaatcttcatttattaataaaatgaggctaataacacagagtgatcattatatctggaaacgtaatgtagcaattccattcctttacatacccatttaaatcaagagatgtacaagatgttcataagcactgtttctaagagcacagctctagaaattacccatatggccatcaataggaaaatgtaaaaatatattgaaaatgaatagaacatagctacacaccaacatggattcattgaaatccattggattsattgaaaatgaattcattttcattggattcattgaaaatgaatatagctacacaccaacatggatgagcatcaaaaatacaatgttaattgaaaaaagcaaaccatataataatatatacattatgatttaatttttataaaaattaaaaatttgcaacaaatactgttgttcacgatttcaaacccatctggtaaaaccataaataagagcagaggaatgattaatcagaattcaggatagtggttgcttggggaggagagtaggagacggggtactggggtcttcaaaatattagtgatctacttctttttaagctgtgttagtatgtgggtatttattcattcatttatttattttgaggccatctcactctgtttcccaggctggagtgcagtggtatgatcatatcactgtagccgcgatttcctgggctcaagtgatcctcctgccttggccacccaaagcgctggtattataggcatgaaccactgcacatagcctggttttattttttgttttagtttaagacatacatatatctctggccactctttttttttcttattcttctttgagatgtggtctcgctaggttgctgaggctggtctagaacgcctgggcttgaatgatcctcctgcctcaggctcccaggtagctgggactacaggcactgaccactcatatgtatcctattttatatgaaacatggtgacttagaactttatcttttattattgaacaacaaatttgagagagaatacagtcactcatgacactagtaccctaaaataactatttacatttttcaaaatttctttctttttttttttttgaaacggagtcttgctctgtcgccaggctggagtgcagtggcgcaatcttggctcactgcaagctccacttcctgggttcaagcaattcttctgcctcagcctcctgagtagctgggactacaggcacgtgccaccacacccagctaatttttgtatttttattggagatgggttttcaccatgttggtcagatgatctcgatctcttgacttcctgatccgcccgcctggcctcccaaagtgcttggattacaggcatgagccaccgtgctctgccaggttttcaaaatttcaaggttaaatttaaatgacgtcttgctatttgtcttcaatttgtcccatttgttctctgttctctcttcttttcttccttctttttgatgaattgaaattttttacaattccattttatctcctttattggcttattgacagtaactttattttagtgactgttgtagggtttatagcatacatcctttatcatagtgtattttcaagtgatattataccatttcatgtataaaaacctgccaataatttacttccatttctcctttcctgaccactttacttttacatgttatgagccccatacaacatcatcgttatttttgcttagtcaattatttttaaaagagatttagtgagaaaatatcttaaatattcatcaatatggttactattttcagtcttttaatttctttttatagatctgtatttctaatatagtatgatttttcttctgtctaatgtagttcctttttaaaaatgtttcttgtggttaggattggctactgaaaaattctctcagcttttgtatgtgtggaaaaatgtttgtttgaaagatattttcaccggatatagagttctagattgatagttttttctttcagtactttgaagatcttgatccactgttttttttcatttgccttgtttctgattaaaaatctactatcatctttatctttctgtatttgtacttaagtgtctgtttttctctggctgcttttaacatttttctctttattactggttttgagtaatttcattatgatgtgccttgcaagtgtagtcttttttatgtttcttgtgcttggggttcatggagcttcttggatccataggtttatagttttcaatgaatttggggaaattttgaccttgtttcttgaaatacttttttctgtgtgctcttcgattcttgcactgttttggggatgacagttatatgtattttgagctgattgaagttgtctcacggctcattgatgctctgtttatttttaaaattatcttttctttctaggtttcattttgtaaagtttctgttgctaggttttcaaggacaccagttttttattttgcaatgtctaatatgctattcattctatccagtatattttttatttcacatattgtttttatgtgtagaagttggatttgggtcttttaaaaaatatctttcatgtctactacatttgtttaacatgtggaatacagytataatcattgttttaatattctagtctccaggttataacatgtctgccagtcctgggttggttttagttaatttttatttccattatgggccatatttttatgcttctttggaagtctggtaattttttttattaaatgtcagattgcgaatattacatttctttttttttttttttaagatagggttttgctctgttgcccaggctagagctagtggccagtgcagcctcaacctcctaggctcaagcaatcctccatcctcagctctcaaatagctgggactacaggtgtgcaccaccatacctggctaatttcttgtagttttttgcagatacagggttttgccatgtttccagggctggtctcaaactctaggactcaaacgatccacccgtctcagcctcccaaagtgctgggattataggcctgagccaccatgcccagcctgaatgatttttatctttctataaataactttgagctttattctgtgatgcaattaaattatttgaaattagtttaattctttcaaaacttgcttttaagatttattaaatattagtcaggatctgagtattgctcagctactaggggtaataatttcctactcctgagccaagacttttctgtgtactctacccaatgactgtgaatcacaaagtttttctgtcgggctggtgagaacaggcactattcccagcccgatatgagtgccaagcactgttatctgtaatcatttctagttgctctttctccagcctcatggtttgatcatatgcatgtgctgtgagtactcagctgaattctcaagcggaaccctctgaaattctctggagttctctctgtatgattctccctctccagggaactaactaccttgtcttctccagtttttcagttctgtctgctcaactcaagtttgccgggctactcctggtttccccttccttgcactgtacattctctcacacaaagacatatggaaatatgtcttatggaactaagctctaagacagctttgtatgccttctacgttggtttttagttcctactttttggtgaagagaagtgctctctcttacaagctcagctattttttttagtcttttattttgaaataatttcaaatttactgaagaattgtaagaatagtaaaaagaacttctaaggccccctcagttagatttaccttttaaacatgttgtcacatttgctttatcacatgttcccaccacactatccccttgattttttctgaatcattcgagagtaacttgcagacaatgtgtccttttatattcctatattcttcagtgaatatattccaagaacaaggcattcttttgcttaaccattatacagttaagaaacttaacattgatgtgtacaagtatctaatatactctcctgttgacacgctgccagttgtctcagtaatgtctcataatgtttttcccctcatacaggattgtgcatttaatttagatgtcatatctctttaatctcctgtaatctggaacagtttattggccctctttgtctttcatgacattgacatttctgaagagtataggctagttttttggagaccatccctcaatttgggtttgyttgatgtttttttgtggttaaattcaggcttgcatttttgggaggaagattacataggtgatgttgtggcctwatcagagcattaaatcagtatgtcttattatttatgatgttgattttaatcatttggttaaggtattcaccagatttctttactataaaattactatttcttccccctataattaataatcagtggggacatacgttgagactacattaatatcctgtttctcaccaaacttttactcatagttttagcacttattgattatttttgcctgaatcaattattactatggttgtaaaatgattttcaaagtctgtcattttttcaccacttagtaaatggcattctactgtaagtttgagtttttccttctcatctgcctttgtttgctgctcctacatataacaaatactatagactgagtgatttataaagaatagaattttatttggctcatagtcctggaggcttggaagtccaagagtgtggcattggcttctggtgagggtcatctcatggcagaagtcaccacatggcaagcaagtgtgagagacagagaggaagggggctgaacatatcaggagcccgctcccacaataattaacccattctcctgatagcaacattaaccagtttatgaggacagaaccctcatgacctaatcacctcttaaagtccccaccttttaatactattacaatagcatcaaatttcaacatgagatttggtgtagacatccaaactagcattatctatcttgtctgtctgtctgtctatctgtgtatctacctacctgcctacctacctatctaatctatctactccatttggattcatgacttctcattttattcagtggattgcatcagtacgaaaggctttgtttttctttaagtgattgttgatgattttttctttttctttttctttttgtttgagatggagtctagctctgttgcccaggctggagtgcaatggagtgatgttgactcaccacaacctctgcctcctgggttcaagtgattctcctgcctcagcctcctgagtagctgggactacaggtgtgtgccaccacacccagctatgttttgtacttttagtagagatagagtttcaccatgttggccaggctggtctcaaactcctgacctccagtgatccacccaccttggcctcccgaagtgctgtgattacaggcatgaaccactgtgcccaaccagttgatgacttttttctaatttggcatgacttaataagaggaaatgagctaaacatcaagacagatgatctttgatttagcatcttttatttaacacttatttactggcctccagactgtgtgaggtgcccattcctagtccattcaggtttatgtgtggggcactgttggagaagacttatgtttagagcacacatgatcttctatttagcacttttagtgaaaagtgatataagatgccctttcaattattttctggagaacgtaaggaacagagaccacctcagatgctttgtcataggatgctatagtgtaaggatatgcatgataataagagacaaatcttggccacttaggaagacctcaggggaacccagggaaagccaaactgtgagattccaatcctattctctcctctcctaaataggaacaaatagggccattatttgagcctcattaagaataagtgaatctcatggagaatagaatcgataggccattctagaatctcaaaatgttatgggttctgtgttacctgtcctagcttcggcagtccacagatcttaattctagtgttttatcaataacctaacttaatttttaaaatctttctgcttttcttcttgctcttaattatctgggtgtccatagttccttagagagacagaggtagattggcctgggagttcatcgctgctgttgttttggcagagcttcccctcctaagtttcccgttttacttaccaacctccaggctatgtcaggtgcccattcccagtccactcaggtgagggcacagttggagaggaatcatgatgtttagaacacatatttcttttcatggaatatcttgtggctccccttgtggtagggttggtggaaagtgcagttttcataagttgctactatagatataattggcaatatggatttgcatcctgttcttcatcctaaagacagagtcctactcagagctgtgcgctgtctgtaggtaatataagctaagtggtttactttttgagttattttcgggatactaatatggtgagatttatttaaatttattttaaataatgataatgctgaaaattggtataaaactgggacaaggatttccagtaatttgataccttgtattattcactaaaattgttatgaaaccatgactgttaattgagtctgccttattaatttggcctgattaagagatataaatataacacagtgtatttttttaacttttctgttattaccgcatcatttagtatttccttaaaagagctattcagtatttctgtgaacatctgtgtagattgtttgcagttaacattttcctgaagccaaaactagacttcccacaatgtataatttacctttgaagatttcctgtgttgggtatcacttgttcatgtgttcttgttatttaatatgaatgaaatattaataactaattgtttaaagtgcagtatttaagttaattccatgtataattaaaaaatttaaatrcattaacatttcacaacatagtctatgattgggattaggactgtttgtgtttgctgttcaaatattcagtataatatttgatatttggataaactgctatttttcatatcaagtatatttgtttaaaattttagaggggatataccagggagcttggaaaatttgtatttgacataaaattatttgattattttcagatattaaaaatgtagaacagtttttggcaatctcacaggcttacatgactattagattttgcaggtttgcatcctttaatgatatgttactttttctgtctacataaaatatttaatttctgggtcatgcttgaaatgggataaaggaagggaaaaatgagatgagatgccttttcacttcttttctagagaacataaagctgcttcatttccattcagcaaactcycccaaacaataaactttatttagaggaaacatatctttaatttaaggtacaatactttccatgtacattgtgtgaattgttaagggtgttgacagttaaaaagctgtctgactgaaccaattatttacaacaagcccaggccagccagaactactttgggaagggatatagacttactaatataaggcaagattactctagagacatgaagtctgggttttggcttcaggaaatatcactttggaaattacactttaggtcagattaaatataaaaagttgaaatatgcatmtaaaatgaattaagttaccatattgactagaacttcttgattgcaaagggatctttaaaaagcatttttattactgttatttgaaattacattcagaatgtttgaaactgcatygtggaactaccttatagtgaagacttcaaaagaacatggtcttttctggctatgaaaatctgattttattattaagttgcctgtgagaaacctgttaatgatggatatttatatatcatttatgatataattagaagtatatatttggtctctgcccctggttcctggcacacaacaacccaaacccttggaatctctaaagtgataagtgttttttgtatgctagtgagatgactggtagctggagagtcctggatagcctcaggattggggggctggttgccagaggagccaactgtgattagagggttggctctttcagctgaaccccacaacctctagaagctgaaggttggatagattctctcatgactattgatctaatcaatcatgcctacataaagaaacctccataaaaccccaaaaggacagggttcagagagcttctggatagttgaacagctggcggtgcctgcagagtggcatgcccaaagaggacatggcactctgtgccccttcccacatgccttgccttatgcatttcttccatctggctgttcatctgtatcctttgtagtaacctttataataaatggataggtataagtaaagtgtttctctgagttctgggagccacactagcaaattaattgaacccaaaaaggggttcatgggaaccctgatatatagccagttggtcagatgcgcaggtcacaacatggggtttgtgattgacatcagaagtggggggtgggggacagtcttgtgggactgagtcgttacctgtgggatccgatgttatctctaggtagataatgtcagaattgacttaaattataggacaacgcatttggtatctgctagaggattgcttatagtgtgcagagaaatgcacgtacatctggtatgagaaatgtgttgagtggtgtgtgagggtaggaaaaacactttggtttgtcctgtctctatactgtgtctaattgaaaaaataaaattacttaactgtgtgcctgtaaaaaggaaataaactcttaatgccaaattatgaattgtgctttcattgtattaaaatagtttacaactagatgaagagttaaaatgccagagttagtctaggattcatgttatttactggattcatattctaaataatataaattatctcccatttaaatattggcacagttattttctatattgtctattatatacatacgcacacatgtgtttgtatatactgaatgctgtatactttatatgtgtctctatatcatatagtaaataagacatttttagtagtatacagtatactgtatagtaaataagatatatttagtagtatacagtatatatactgtatagtaaatacctttggtagtataccatatatatactatagtaaataagagatctttagttatatagtatatatactgtatatactatatatacagtgcatacactgtatatactgtatatacagtgcatacactgtatatactgtatatacagtgcatacactgtatatactgtatatacagtgcatacactgtatatactgtatatacagtgcatacactgtatatactgtatatactgtatatacagtgcatacactgtatatacagtatatatactgtatatacagtgtatacactgtatatacagtgtatatactgtatatacagtgtatacactgtatatacagtgtatacactgtatatactgtatatatactgtatataccgtgtatatactgtatatactgtatataccatatacagtatataccatatatactgtgtatatatgtacatactatatatatacatactatatatgtgtatataatatgtattatgtatagagagacatactatctatagtagagaacaatacatttctagactatttctattatgtaacatagagaaataatcattgtattgatcccaagtctgttttgttatggtagttgtcccctaggcagccctcctttgccatgtttttcaaggttgcattacagaattactgatgacagatatgtatgttgtctttctattttaaccctctaccaagcagaccatttttaaaggataaggttaaaaagtgaatatgatcatgattctcaaaaaaatataaaatgataatttgtcaaagattatatttaactcaataatgatattatgccagttgaagtaccacgtattgaatgcaaaactggcaaaactgatgaatatccactgagaaataatcagttccattttmcaggacataatttgcatttctatggacaggaattatttgtattattatcagttttctacaacttttctctctactgagttgtagcatggcctagtcaatgacagacaaatggacaagctagccaaaacactcactgaatttcagtcttttacatttttttttcttattgttcaatactggtacccctggtacttcatattagcttgattttagtagcttcagtagagtaattgattcatgtctacccatgtttttaagttattcatgtctacccaagatggaaattctgtgagggtaggcaccttaaaataaaatgcatgaatctataaatgaataaaatgatgttcttggtataaaagcacaaattgattggttaaaaactgtgtcctgattcagaaagtagaagaaaatagggattttctaaatctaatcttatttcagttgctatcgggggaaattcagccagayatygggtaaaattcacccccgatatttcacgtaggttcttttctatcttccctaagtgtcggccagtctgagaaataaagggacagagtacaaaagagagaaatgttaaagctgggtgtccgggggagacatcacatgtcggcagcttccgtgatgccccctgagctgtaaaaccagcaggtttttattagtgattttcaaaaggggagggagtgtatgaatagggtgtgggtcacagacatcacgtgctgcacaaggtaatagaatatcacaaggcaaatggaggcagggtaagatcacaggaccagggtgaaattaaaattgctaatgaagtttcgggcacacattgtcattgataacatcttatcaggagacagggtttaagagcagacaaccagtctgaccaaaatttattaggcaggaatttcctcgtcctaataagcctgggagtgctacgggagactggggcttattttatccctactgcttctaccataaaagacggctgccccctgaagcggccattttagaggcctaccctcagggacgcattctctttctcagggatgttccttgctgagaaaaagaattcagcggtatttctcccatttgcttttgaaagaagaggaatatggctctgttccatctggctcactggcggtcagagtttaaggttatctctcttgttccctgaacattgctgttatcctgttcttttttcaaggtgcccagatttcatattgttcaaacacacatgctctacaaacaatttgtgcagttaacgcaatcatcacagggtcctgaggcggcatacatcctcctcagcttacgaagatgatggaattaagagattaaagtaaaaacaggcataggaaatcacaagggtattgattggggaagtgataagtgtccatgaaatcttcacaatttatggtcagagattgcagtaaagacaggcataagaaattattaaagtattaatttggggaactaataaatgtccatgaaatcttcacaatccacattcttctgccatggcttcagccggtccctccgttcagggcccctgacttcccacaacaagttgcaatgagggagccagttatataaaggaatccagcaacgaatcctttytttttttttttttttgaggcaggtcttgctctgttgctcaggctaaagttcagtggcatgatcatggctcactgcagcctctacttcctgggctcaagtgatcctggtctcagtctcttgagtagctaggagtacaggcacatgccaccagccaattaaaaaattattttttttaagagacagggtcttgctattttgcctgggctgctctcagactcttggccccagtcartcctcctgccttggcctccaaaagtgctgggattataggtgtgagccactatgcctggccaatgaatacttttgaagagcagaaatcctcttctaactaaagttatttcttgccttatgtgttttaaaaatgagaactttgtatatcagattttaagttgggcataacttttcactccaaaataattagaagcattgaaccaaggaaaaaacaagcatgacaagttatttttacaaatttctcatattgcatgattttgccctctttactctcttgctagtgatttatgctgtccaacttttttttttttttttttttttttttttttttgagacagagtctcactctgtcacccagctggagtacagtggtgcaatctgggctcactgcaacctccacctcccaggttcaagcgattctcctgcctcagcctcctgagtagctgggattacaggcgcccgccaccatgcctggctaatttttgtatttttagtagagatggggttttgccatgttgaccaggctggtctcaagctcctgacctcaggtgatccgcccaccttggcctcccaaagtcctgggattataggcatgagccaccatgccccgcctactgtccaatttataattaataacaacatattagaaataacttacagctggataccctttttatctggggcaaatactacacatgataaggtagtttctacctatctactcctggcagttagactgagccaatcagatagttctgcccagagagcttactcttaaggaaacaattggtgttagattagttagattagatgaagtagctgtggaatagttgtgagtctagcagtatggtggtagggagtgaggaaaagtattcagtgggttaagggatatgggactggaatacacgatatgggatttttgccattccttgcctcctttggtttcctctggagcctgattatctrtacgtccactgcttctgtgatttgcctgatttctttgcagtaattttcctttctgttaaagtttactggagttggtttctgttgttttaaacaaagcgagaagaagaaaaaaccaagtacatgattatgtgtctgggcagatgatcattatcaagtttacatgggagagagtaaaatatatataaamtatatgtgggaaaaatagaaacagtgctgaaataattaggttgctgaattataacccagtagactacatgaattaatttatggtatgatacgaataactatgaatatatcatgttgaagcattgtagttcatctttcacctgatggtcttgtgtccaagaatgtttgaatatttaaaacttttctggcatcttaaaatacgagccacttctagtaatggtggagtaggtcatattgaactaatccttttacagaaaaccatgataaattctggacaaaatacagaaaacccacaactctctgaaggcactggagagtgaccatagcaggcataaactgaaaggaagtctatacttggaaagagggagtatcaccgaataaacaaaaatgaggttttgttgccagcagaccttcactgcaagaaatgctaaaggaaattcttcaggctgaaaggaaatgataccagatggaaacttggatctgaggaatggagaactccagaaatggtaagtatatgggtaaatatatttatttctctcaattaaaaaaatgactaagtttaaaaattataacattcttctgtgaggtttgtggcatatgtaaatatagtacactgatttattttacacatgaggaaagtgacacatggtaatgttaaataatttaccctgaccaggcgcgatggcttatgcctgtaatcccagcactttgggaggccgaggcaggcgaatcacgaggtcaggagatcgagaccatactggctaacacggtgaaaccctgtctctactgaaaaaaaaaataccaaaaattagctgkacctagtggcacgcacctgtagtcccagctattcaggaggctgaggcaggagaattgcttgaaccaagaggcggaggttgcagtgagctgagatcgcgccactgcactccagcctgggtgacagaatgagactccacctcaaaaaaaaaagaaaaaaaaaatttacccaaagtttcataaagtgtaagtggcagagcaaggatttgaacacagtgtgtctaacttcagagtttatgctccaagctactatattataccacctcagaaaatgaaaactgaattaaacttcatgactagcatatggcaaataaaatacaatatatgaataaactaaattaaagtatttgtcaaaaatatgaaatatgagaaacatttaattcccatctctagtgtacttggcattctgtttttcctacatataatatatacacttcaatttctcccctgtaaacatgataatgatcatctacctagatgtatccctgtggttaatccctagggcaggtaatacctatcccaagttcatcatcccttggctttattttgtcacttagcccttcctttgctctcacaacccctattttaatatgtttgactggaaaacaagagccaacagcctagagtaggaaagctaagggaaaagttgatgaggtgaaggttaaggggaggatagaaaaatcaggctattctttggtggggaaggacataaacatccatcaagttcataaaaattctctgcgttttgtccagtttgagaatgcatgataatacatatgttttcagaccttttttaagtagcaaagaaccctttttccaagttaaatatttcattttattgcagtgtataaaacaaatatattgtttacacgggtgtttttgtacttttacatttataaatatttgcatcaagttaatgggattagccattttttgaaaaaggccaaatttgaaaatgagagttgtggatgtcagttgtgatyttagtctcagcacccagttatttctgtagttttagtgaataagtattgagataagtggtgaaaatggccctactaacagaagcagggagccagtcattcaaccacatccttaaccccttttcttgagctgtcttttgtgattttaactatatataggtactcagggttcaaagcatatgagagagtctgaaggtgttttaaaactacccattggggtactttcaatgctatatatagtcagatagtcctttctgagggcttctaagtaaactgaaaatatgcttgctagccccatctaccaggatacagcaaatttcatgtaggtggggaatttggggggaaatagttatcaacacagtgttaactggctacttgattctgcatgtcagtggtagctctgacccactgagcccttgcccacgtgagttagcaaatgtttgtgaggaaattgagtacaggctcccagcactaaagctatagaaggaagaaagccaggtgttcaatatcaggtaggatagtgcttgtaatctttggaccttcccgtcttttttttgaatgacattgcttccttgggctttcccattttgctggatctttcttttttgcattggtgacatagtatagctttagctagatatatgtgaaacaacacataacatatataaggccaaaggaaaaaaaaatacatgtatctgctctccagcttaagaaatagaacattaacagtgcttttgaatcacctacagatcccttcccaattgcattcttctttttcctcaccagtgataaccattgtctcaagtttttagttaattattctcttggttttcttcatagacttttcatttgtattctaaatagaaggtttcattttgatcatttttgaattttatagaaattagcgtttttctgcagcttgtttctttgttcaacattgtttttgagagtcatctatgttgttttctaccttatactttatttgttctccattttccatttaatgatatttaggttgtttccagtttttaactatttctaacattggtactatgaaaaataaagtagagattcctcttcaaagactttcctccccatttaattaggaataaatagtaacttctcttagaagcaaaatttgttcaaagacctgtgctaacattcttaaatatctgctagccgtgataaagaaatcagtgtactttatgttgttagctctcacaatttagcctaaatatttgccctggcatgcttatactggtccaagcaagcattaagtcatagcctgtttctcttccttatttgaaggtgtttttacctttcttagcrttccacaagttacttcctccttcctttgttctcctctgcctttgcctcttttaacaagttctaagttgctagccagtcgggacaaatacaaaatgtgaggtcccattccagcyaatggaaactggacacagcagtagggtggacgcatcaggttataaatgaccctgtctcctttgtttggtgtactctcgtggcaaaactgctggtgagtgtaccctttctgcaggaagtaaaaatggccttgctgagtaaattaaatttatgttcaagtgctatttctttacggcagtgggaaacaagcgtttcaaatagtactatgtgcacttttataaatatctcccattacaaatgagaggctgttgtggaatttttagagctctttagagagagaggttttttttgtttttttttttaggaatttattcagcatttatagtcagagacttcttccttctttctaacctaaagtagttatattactcttaaacttgtttccttttattctagaaggcatagtagttgaactagattgcttgggttaaaaattcccagctctctcatgtttgtttagtctagggcaagctaattaatctctctgaccttgtgccttcacctgcaaacaacctcatatggctgtcataaggatcattgaattaatatatgtaagtgcctgaaacatggcaaactttcagtaaatgttagctcttattattcttaatctacccataatggaagtggaaaaagctgtcattattttttatgggatacccatttgtacacttaaattcagtactcctcaaccctattctaaattcaaagacatacttattggattttaattcaaattatatcaaaatgaggtatataaaaaattatttattcaatgagtttaatatctactggatgcctggcatcgtgaaaggcactggccaaacaatggtcaactaaattgacatggtttctgcccttaagaaacatcagagtctaacagagaataaagatcaaaaaaaatacacaaatatcgaatttcaaactgttattagtgctatgaaaataaagaatatgggctatgaaggggaaaaaaacaagggatgtctactttagagggaaggattggggaacgcctcttttagcaactgatatttaaactgtaactgtagctaagtagggggaaaagtgcttcttacagagggatcagcatgtgtccagctcctcaggtgggagagagcctggcgtattgggggctcaagagaagctagagaggctagagcttagtgaacaaagtgggagctgcatgaagttaagttgagagtgtgatataatgggaaatgaaatatatacttggtctttgttcttggtttttagcacatagcttctaaaacccttgcaatctctgcagttgataagaatgtcttttgtatgctaagatgactggtggctgggggtccctagatagttttggaatgggggctggtagccagaaagaccaagggaaggatagggtttgaattttcagccccactccctgacctctaggggaggggagagaggctagaggttgagttcagtcagcaatgtccagagatttaattattcacgcctattaatgaaacctttaacgccactaaataacagagttcagagcttctgggttggtgaacacattgcagtgctgggagggtggcaagccagtagaaggcatagaagccctgtcctaacctttctccccacaaccacaccacccccgacctcaactccacccgacccctgctgccatttgccctgtgcatctcttgcatttggctgttgctaagttgtattctttatgataaactggtaacagtaagtaaggttcctttctgagttctatgagccattctagcaaattacagaacctgaggagggggtcgtgggaacccttgaatatatagctagtcagtcataagtatcagcaacaacatgggacttgcaaccaatatctgaagtgaggacagtcttgtgggactgagctcttaaacctgtagagtctgttgctaattctggatattgtcaggattgaactgaattgtaagacatccagttggtgtccagagaattggagaattgcttggtgtggacaacctccacacatttggtgtcagaagtgtgaacccagaaaatctgagacaggtctcagttaatttaggaagtttattttgccaaggttgaggacgcgcctgtgacacagcttcaggaagtcctgacaacatgtgcccaaagtggtcacagcacagcttagttttacacatttagggagacatgagacatcaatcaatacaagaaagaagtacattggctcagtctggaaaggcaggacaacttgaagcaaaggcaggacgactagaagtggggagagcttccaggtcacagataggtgagacacaaatggttacattcttttgagtttctaattagcttttccaaaggacgcaaatcagatatccatctatctcagtgagcagaggagtgactttgaattgaatgagaggcaggtttgccctaagcagcttccagcttgagttttctttggtgattttgggggaccaagatattttcttttcacagacgtataaaaacagatcagagtggtacattcaaggtcctgcaaaccaagtaaagggaaatggatgggaattctcggagaatttgaggttggagaagagaaggatccattttatatcttaaaggatctgtctgtagcatagagaaagtactgagtatagatgagttaggagactgtaatagattgttgaggtagaagatgatggtggcagtggatataaaactagacattcagaaatatttaggatatagaatagacaggactgggcgatggctatatatgtacctgcagatggtgagagagagggagatgtcaaggataagagttttgactaatcaatctcctttgcaaagttttaaattgtgtttgtggttttttattcaacctgctcaggtttacaacttttctctttagttatataacctataatataattcagtattttttcaaaaatagaggcttaactaatgtgggattccaggttatatatggtgatttcctgcttgctttttaagattatctatcaatatagtaatttattcattaattccttgagaatttacatttagcaaggcattggtaagatacaatgattcagaagtgaattgaatgaaagcacaatgctcaaccactgacaccttatttttctcagtgactccttgatgttttattatactataattcatatcctatagagtttaaatatttctttaattttctaaggttatttaaaatacatacctgtgtattttcaaggtgtatatctccagcttatattctgttggttctgaccaacagtcatccatacatttattcaaactcgtattgaagcgaattgaattttcagtctatgtattcataacaaattcataagttttataaaaaataacgcattactttttttggtcttaaaacaatatcctgcaagctttgaaggttgaaaattttaagtctaataatctgggatttgataatcattctgtgttcagccttttcatgaccttaatgctttaggataaatctcgttttgctttcatcattctggacagtagtctgatctttttaaaaagtgcagttttggccaggtgccatgactcacgcctgtaatcccagcacctttggaggccaaggcggcagatcatgaggtcaggagatcaagactatcctggctaatatggtgaaacaccatctctactaaaaatacaaaaaattagccaggtatggtggcacgcgcctgtaatactgacaactcgggaggctgaggcagtagaattgcttgaacctgggaggtggaggttgcagtgagccaagatcgtgccactgcactccaacctgggtgacagagcaagactctgtctcaaaaaaaaaaaaaaaaggtgcagttttaagctttagtaacatcacaagtataaatactatagatttagaaagaacatcatttgaaactttaattatttacatttgttttatagtcatttatctttgttaattttgaataacgaaattttaactttgatttttcatttcagttgattgaagatcagcaaacattgaaaaaaagttaattgtgctatctggttagccgaactcaaactcacgatgacagaaacaagaaaactcacttcctgtcgtaagaaggaggttccccacagacattgaattaacaactggatgaaaacttcaaggaaactgggtccatagttcacaacaagcctagatctgggagatgccagcaagcagaaaaactgtggctgaaattgaggcagtgttagcagagtcccaaaagcatgcactgcacatttgctgaattgaatattccaaaaccacaggttacagaattctaacagtgaaattccgaagcatacctaaatgtataaatgctacaagttaaccaggctgaacttggcttctgtcatctaatgaaatgagaaaatgaaatttccaaaaatattcttgacaagttgacccttataatgaagcacctttccacctaagtgacagtgttttctgtcaaaagtacttcgttttatgtacagagaagccaccaaagtttagcaacatgagaatccccaaaagttaatgtttggtgggccattaaggaatcttgcattaccagccctccatttttattgtgatataattcatataccctaaaaytcacccttttaaagtgtacaatttaatagtttttagtatactcaaaagtttgccaccatcgccactgtcttagcccattttctgttgctagaacagaatacctgagagtgggtagtttataaagtgaagaaatttatctcttacagttctggaggctgacaagcccaatttcaaggggctgcatgaaggatgaagtccttcttgctgtgtggtagaaggcatcatatggtgagaaacagggagtgtgttttctttctcttttttaaggccacagtccttttgcactagggatctacccttatgacctcaatttaacctgaattgcctcctaagaacctatcttaagggatacattgaaaccatagcaaccactatctaattgagaacatttttatcaacccaaaaagcaggcctatatgcattagtagtcattccccatttctccctccctgcagtcccagcaagtaatctactcagtgtctctatggatttgccccatctacacatttcatatatatgaaattatacaatatgtggctttatgtgtctattggctttttctttttgaagaacctmtaatcagtgataaattttacttggcagtgcttccgtattttttcatttccatactacagtggttattccattaaatgatgctatttttcaacaagcagaggacttgttatacgttccatatgtggcattttctggatgacactttttcagactagtgaattagtagtagaagagatcgtgttgcttgctgttctgtgtctcacttgttctattaacattacaattttttgatggagttatgttaaaactgtcgtatatgcatcaaaaccttgttctttggatggtcttaagactagaattagaaatgcaatcctttcagtcattgcaccagcagtgggctgtatgtatgtatgtatgtatgtgtgtgtgtatttgtgtgtatacctacatatatttcctacctctgatctctgagaggacttagaagcaatgacagtctagtagcagtgagcacactagtgtccacatctctatttttaactatcattttccactaaaagggttcagggcctcttagagaaatagcttgctgtgccagaaaacaatgaaatgttgagagaatgataaaaccatgtcaaaagcacacaggagcaagcttgaaggaactccagtggccaaatctgggacattttgaatgtcagaataaataataatacatttaactcattaagtaagttgaaattcacaagtacatacatgaaatttataaataagtttcaattggaaagctctaccttacagtataataccaacttatgtagaaaaatgttggaattagaaaatcatctttggcaattctcatagtaataatttatttgggcagaatcatcagtggattctgtaactggtaggtgaaatttttgttggaaattttttatttttaaaaattttattatttttaaagttttaagttccaggatacatatgcaggatgtgcagctttgttacaaatgtgtgccatggttgcacctatcaacccatcacctaggtattaagccccacatgcattagttatttatcctggtacactccctcccaccacaacccccgacaggctctacccagtgtgtgttgttccccttcctgtgtccatgtgttctcattgttcagctcccacttataagtgagaatatgtggtgtttggttttctgttcctgtgttagtttgctgaggataatggcttctggcttcatccatgtccctgcaaaggacatgatcttgttcctttttatggctgcatgctattcctggcatacatgtgccacattttctttatccagtctatcattgatgggcatttggactaattccatgtttttgctattgtgaatggtgctgcagtggaaatacatttgcatgtatctttataacagaatgattgatattccttttggtatatacccaataatgagattgctaggtcaaatggtatttctggttctagatctttgaggaatcatcacactgtttttcacagtggttgaaccaatatgcattcccaccaacagtggaaaagctttcctgttgctccacagccccgccagcatctgttgtttcttgactttttaattactgccattctgactggcaagagatggtatctcattgtggttttgatttgcatttctcaatgattagtgatgtctagctttttttcacatgtttgttggctgcataaatgtcctcttttgaaaagtgtctcttcatgtcctttgtccacttcttagtggggttgtttttttcttgtaaatttatgttccttgtaaattctagatattagacctttgtcagatggatagattgcaaacttttcccattctgtaggttgtttgttcactctgatgatagtttcttttgctatgcagaagctctttagtttcattagatcccatttgtcaatttttgcttttgttgcaactgcttttttttttttaattattatttgagatggagtctggctctgttgccaggctggagtgcagtggcatgatcttggctcactgtaacctccgcctcccgggttcaagcaattctcctgcctcagcctcccgagcagctgggactacgggtgtgtgccaccacgcccagctggttttttgtatttttagtagagacagtgtttcaccatgttagccaggatggtctcaatctcctgacctcatgatccgcctacctcggcctcccaaagtgctgggattagaggcgtgagccascgtgcctggcctgcaactgcttttgacattttcattgtgaaatctttgtccatgcctatgtcctgaatggttttgcctagattttcttctagggtttctgtagttttgggttttacatttaagtttttaattcatcttgagtgaaattttgcataaggtgtaggaaaggggtccagttttagtttttctgcatatggctagccagttctctcagcaccatttatttattatactttaagttctagggtacatgtgcacaacgtgcagrtttgttacatatgtatgcatgtgccatgttggtttgctgcacccatcaactggtcatttacattaggtatttctcctaatgctatgcctcccccaggcccctacctcccaacaggccccagtgtatgatgttcccctccctgtgtccatgtgttctcattattcaactcccacctatgagtgagaacatgcagtgtttggttttctgatcttgtgatagtttgctgagaatgatggtttccagcttcatctatgtccctgcaaaggacataaactcacccttttgtatggctgcatagtattccatggtgtatatgtgccacattttcttaatccggtctatcattgatggacatttgggttcgttccaagtctttgctattgtgaatagtgccacaataaacgtatgtgtacctgtcaacagcatttattaaatagggaatccttttcccattgcttatttttgtcaggtttgttgaagatcagatggttgtagatgtgtggtcttatttctgagatctctattctgttgcattgatctatgtgtctgtttttgtaccagtacaatgctgtgttggttactgtagccttgtagtatagtttgaggtcgggtagcatgatacctccagctttgttctttttgcttaggattatcttggctatacacacttttttttggttccatatgaattttattttattttattttattttcttgcgacggatttttgctcttgtcacccaggctggaatgaaatggtgcgatcttggctcactgcaagttccacctcccagcttcaagcggttctcctgcctgagcttcccaaatagctgggattacaggcatgcgacaccacgcctgactaattttttttgtagttttaagagacagggtttggtcaggttggtctcgaactcctgacctcaggtgatccacctgtcttggcctcccaaagtgctgtgattacaggtgtgagccaccatgcctggccccatatgaattttaaagtagtttttctaattctgtgaagaatgtcaatggcagtttaatgggaataacattgaatctataaattactttgggcagtatgatcattttcatgatattgattcttcctatccatgagcatggaatgtttttccatttgtttgtgtcctctctgatttccttaagcagtggattgtagttatccttgaagaggtccttcacttcccttgttaaccattatgttaaatattcctagatattttacttcctttatagcagttgtgaatgggagttcactcatgatttggctctctgcttgtctattgttggtgtataggaatggttgtgatttttgcacattgattttgtatcttgaaactttgcagaagttacttatcagcctaagacacttttgggctgaggtgaaggggttttctagatataggatcatgtcatctgcaaacagagacagtttgacttcctctcttcctatttgaataccctttatttctttctcttgcctgattgccctggccagaaattccaatactatgttgaatargagtggtgagagagggcatccttgtcttgtgctggttttcaaagggaatgcttccagcttttgcccattcaatataatattggctgtgggttgtcataaatggctattattttgagatagattccatcaatacctagtttattgagagtttttaacatgaagggatgttgaattttatcaaaggccttttctgcatctattgagataatcatgtggtttttttctttagttctgtttatgtgatgaaatactgatttgcatatgttgaaccagccttgcattccaggaatgaagctgacttgatcgtggtggataggctttttgatgtgctgctggattcggtttgccagtattttattgaggatttttgcattgatgttcatcagggatgttggcctgaaattttctttttttgttgtatctctgccaggttttggtatcaggatgatgctggcatcataaaatgagttagggaggagttcctccttttcagttgtttggaatagttttaaaagaaatggtactagttcctctttgtacctgtggtagagttcagctgtaaattcatttggtcctggcgtttttttggttggtaggccatttgttgctgtctcaatttcagaacttgttattggtctgtttagggattcagcttcttcctggttcagtcttgggagggtgtatgtgtccaggaatttattcatttcttctagattttctagtttatttgcatagaggtgtttatagtattctccgatgtttgtatttttgtggggtcagtggtgagctcccctttatcattttttattctatttgattattctctcttttcttttttctttttcttttttttgagacagagtctcactctgttgccaggctggagtgcagtggtgcggtctcagctcactgcaacctctgacaccctggttcaagcaattctcctgcctcaagcctcccaagtagctgggattacaggcacgcaccaccacgcccagctaatttttgtatttttagtagagacggggtttccctgtgttggccaggctggtctcaaactcctgacctcaagatctgcccacctcaccctcccaaagtgctgggattacagacgtgagccaccacgcctggcctcttttcttctttattagtttagctagccgtctattttgttaattttcaaaaaaccagctactggattcattgatttttttttttaagaggtttttatgtctcttatctccttcagttctgctctgaacttggttatttcttgtctgctttgattctctagctcttttagttgtgatgttatggtgttgatttgagatctttctagctttttgatgtgggcatttagtactataaatttcccttatgacactgcttcagctgtgccccagagattctrttatgttttctctttgttctctttggtttcaaagaacttcttgatttctgtcttaatttcattatttacccaggagtcattcaggaggaggttgttcaatttccatgtagttgtatggttttgagtgagtttcttaatcttgagttctaatttgattgcactgtggtctgagagactgtttttataatttcacttcttttgcatttgctgaggagtgttttactttcaattatgtgatagattttagagtaagtgaatgtggcaccgagaagaatgtgtattctgttgtttttgggtggagtgttctatagatgtctgtcaagtctacttgatccagagctgagctcaagtcctgaatatcctcgttaattttctgtctaatattgacagtggggtgttaaagtctctagctgttattgtgtgggagtctaagtctctttgtaggtctctaagagcttattttgtgaatctgggtgctcctgtattgggtgcatatatgtttaggatagttagcttttcttgttgaattcaaccctttaccattatgtaatgccccttctttgtcttttttggtctttgttggtttaaagtctgttttgtgagaaactagaattgcaacccctgctttttttgctttccatttgcttggtaaattttccttcatcgttttattttgagcctttgtgtgtctttgcacgtgagatgggtcgcttgaatacagcacrctgttggggtcttgattctttatctagcttgtcattctgtgtcttttaattgggggcatttagtccatttacatttacggttaaatgagtgaatttgattctgtcattgtgatgctagctagttattttgcagacatgttgtagttgcttcatagtgtcattggtctttgtacttcagtgtgtttttgtagtggttgataacgttctttcctttccatatttagtgcttcctttaggagctcttgtaaggaaggcctggtggtgatgaattccctcagcatttgcttatccaaaaaggattttatttccccttcacttatgaagcttagtttggctggatatgaaattctgggttggaaattcttttctgtaagaatgttgaatattggcccccaatctcttctggcttgtagggtttctgctgagaggtctgctgttagtctgatgggcttccctttgtaggtgacctggcctttctctctggctgtccttaacattttttccttcatttcgaccttggaaaatctgatgattatgtgtcttgcggttgatcttttcatggagtatcttactggtgttctgaaaactaaaaaagccagagtgcctcttctcttccgaaagatttcaacacctcttcagcaagggcacagaactggatggaggctgagatgaatgaattgacagaaataggcttcagaaggtgggtaataacaaatttcactgagctaaaggagcatgttccaacccaatgcaaagaggctaaatttgaatgttggtctgctttgctagtttggggacattctcctggattatatcctgaagtatgttttccaacttggttccattctccttatctctttcaggtaccccaatcaatcgcagrttcggactttttacataaccccatagttcttggaggttttgttcgttccttttcattcttttatctctaatcttgtctgcctttcttatttcagcaagatagtcttcaagctctgaaattctttccttcacttggtctatttggctgttaatacttgtagttgatttgtgaagttctcatgttacgtttttcagctccatcaggtcattgatgttcctctctaaactggttattctggttaacagctgctgtgatgttttctcatggttcttagcttctttgcagtggattagagcatgctcctttagcttagagaagtttgttattacttaccttctgaagcttacttctgtcaattcatccatctcagcctccatccagttctgtgcccttgctggagaggattatttggagacgaggcactctggcttttttatttttcagcatttttttcactgattctttctcatctttgtgagtttgtctagcttcaatctttgaggctgctgacctttgcatggggttttttggggactttttttgttgatgctgttgttgttgttgttcctttctgtttgtttttcttttaacagtcagacccctcttctgtagggctgctgcagcttgctgggggtccactccagactctgttttcctgggtccctctcacactggagatgtcaccagtggaggctgcagaacaacaaagatggctgcctgctccatcctctgggatttccatcccagaggggcaccgacctgatccagtgggaatgctcctgtataaggtgtcctgcaacccctgttgcgggggggtctcacctagtcaggaggcacgggatccgggacccacttaaccaagcactctggctgccccttggcagagagggtgtgctgcactggggggaatcccactggcctggaccgcctggattctctagagacagcagggggaaaaactaagtccgctgatctacggagatcatggctgcctctccctgcaggggtacagtcccagggagaccagagttctgcccataaacccctggctagagttgctgaaattccctcagggaggtccccccagctagtgaggagggatgggtcagggtccggcctcaagaggcagtctggccacaatctgccacaggcactgtgctatgctgtgaggaattcctcccgtgtccaaactgcccagtctccttggcactggcaggggaaaaatagcagaccagagctgcaatgatggctgccgcccctctccctgggaacttggtagtcttaggcagtctccagccaagtggctgtaaagaatctgcacatctctgtgcgttagactaaggccctgctggcatgagctcatgaggggatctcctaatttgtggactgctcagatctgtggaaaaagkgtggtttcttgggcagggtagcacaatttctcaccccctcttggctgaggggtgggagcttcctttcccccatgtagctcccaggtgggctgtcacaccaccctgcttttcctcagtctccatgggtctcaccagctgcctagtcagtcccagtgagagaacctggatacctcagttgttggttcaggactcaatcaccatttttgttcttctcagtagtaggtgaaattttgatgaggaggatacttgcataatttcataatatctgcccacaaaatatttattaatctttttttttttgagacggagtttcgctttgttacccaggctggagagcaatggcgcaatcttggctcactgcaacctccgcctcctgggttcaagtgattctcctgcctcagcctccaaagtagctgggattacaggtgcctgccatcatacccagctaattttttgtatttttaatagagatggggttttgccacgttggccaggctggtctcgaactcctgacctcaggtgatcaagtacaacatatttattaactgggggaaatcatggtagacaccaatttaccaagtgacataagttgccaaccccaataatgggacaagttgacattgtgtgcctcctgatataatgaacctagaagagcatggcatcatttctgcagtattcttgccaaaaatacataagccacatctaattccaaggaaacataagaaaaattcaaagcgaagaaacttctataaagtaaccagctttatgcatcagaaatgtcaaaatcaagagacagcaggaagtgttccaaattgaagtggaccaaagagacataacagtgaaatgcaaagcatgatcctgaattggatctaaacattattggaacaatgggtgaaactggcatttggtctctggtttaaatggtaaaattgtgttgatagtaaattattaattttgatggttgtactgtggttatgtgaaagagtgtccttggttttaggaaatacacactgacatatcaaggggtaatggagcattgtgtctgcaacttaatttcaaatggcttgaaataaatttgtgtgtgtttgtgtgtataagagaatgttaaattgaatgaggtaaaatgttaattggggaatctgggtcaagggtatagaggagttttttttaaaaatcatttttgcaacacttccattaacttgaaattatttcacagcaaagctagaaaaacaaccctcttttcttctaaaattgaatatccctatgacccaattcacattgaatgctctacttaccaagaaaaaagttttkttttttttaaaagcatcagattgatgtaaaggtgagcttaaatatttacacaaaatagaagaatggaaaattatgtcttgaatatgttgaggtcaacatgagacatgttgrtattttaaatcttgaaaaaaataccctgcactccaaaatgcataaatcatttccaaacakagatgaattgaggaaaaatagcatcctggaggacaaaacacctcaggcattcatcccctgacctaaccaaatgacagatcttgaagcaacttcaaagctgcaaaaataactggctctaacacgtaccaggatcgggaggatgggcgggaaatacttcccacaaccttgaaataaatgattagttcaaagagaataaaagaaaatgttgtatcatatttcataaatggaatttaacagttgaagagttcacattactcatttgtaattttattattccttggcaaaagctcgtaaaattaaatcaagcttatttttatatcagttcttcctctctcccccttacagtggtgtggggagaactaaacacttaaaaaatactgttgctttccccaagtgtcagtgagtctgttggatgcttttccttcagtgccatcaggcccagagaggttaaatttcatttcataattcttagtttggcatgcaaggccttctgtagtttagtggtaacctatctaacttttcttaacttcactgcttagtagaaatcacctttagacacacttgtatttattttacgctgaaaacaatctttggtttttattatgtgtgattctcttatctctgttattttctaaaagtttgctactcatctgacaaaacacaggttctattccttccaagaagctgtttctaatcactgctggtccctaatgatttctctgtattaagtgatttatagcttttttgttagtgccttttatttggcatttagtcacacatttcctatcaaatatcctgtattattgttctgctgtttgtatctgtgtcctttgtcttctcaactaatttgtaaaccctaaaagaagagatacccagcatcacgcaatatacccatataacaaacccacacatgtaccccctgcatttaaaagttgaaataaaaaaaagaggagatactgtgtttataccttataatcttcctgacagtgtctagctattttttaagttgaattacttctttattactttttaaaatgcagatatcttttaaacacttgttacttartatgagaataaatctttaaaaattggcattttattactgctttctggaatctttaaaattaaataatttttatgcattagagtaggtgtatatatatctctgggaataactggaataaacaacataaaagagaaagaatagagaaaatttattttttataagtcttcattctgctcagtttaacagtgcccaaatacagagtaaatattgatactagtgaaataacttttcacaactttttttgggtactataatagaatacttggattttaaatagaatatagaatataaaatattgttttaaagaaagcagggccggccgggcgcggtggctcacgcctgtaatcccagcactttgggaggccgaggcgggtggatcatgaggtcaggagatcgagaccatcctggctaacaaggtgaaaccccgtctctactaaaaatacaaaaaaaattagccgggcgcggtggcgggcgcctgtagtcccagctactcgggaggctgaggcaggagaatggcgtgaacccgggaagcggagcttgcagtgagccgagattgcgccactgcagtccgcagtcccacctgggcgacagagcgagactccgtctcaaaaaaaaaaaaaaaaaaaaaaaaaaaaaagaaagcagggccaagtgtggtggctcacacctgaaaatccagaaccttaggaagctgaggtaggaagatcacttgagcccaggagttgagaccagcctgggcaacatagtgagaccctctctcttaaaaaaaaaaaaaaagaaaatgaaagcaaaacagaatattcatatttaggtttatactaggataagaagatttaagaaggaaagactgtgatggggataggttagaaaaggacaatgacaaatctggcacattataaaaaaatcacccttttcaaatgggtgccttttatgtaacaaataattcacataygtgtctttggttttagaaaacaaaagcattatgccagcattttgcttttaacatattttgagtcttatttgccttaatattatctaagagcagtgtgtccaacatgtccttgtcatgataggagtctgtattagtccatttatgttgctataaagaaatatctgaggctggtaatttataaagaaaagagtgttattttggttcatggttctgcaggctgtacaggaagcatggtgctggcatctgctcctggtgaggcctcaggaagctttcaatcatggtggaaggcawtggagtcattgtcattgtatcacatggcaagagggggaggttccagactcttaaataacccgatctcacttgaactcagagtgagaacttgctatctcaaggagggcaacaagccattcatgagagatctgcccccatgacccaaacacctcccgccaggccccatctccaacactagggattatatttcaacatgagatttggaggggacgcaatccaaactatattacagtcatattttttactagtggatttttttttgtatttatttataaatgaaagctaagctaatttttcttgtggattaggaaagtttatattgtacataagaaatgatgaatttgaaggtcttcatttttgaaatcttggaataaatgctgatatttcagagaagagatttagatcattttgaaagacatttataaggtagactttagtgggtagtggttgactggatgtgagtagcaaggcagaaggaggacaaaagacttatacgtaggtttctgccttgagcaattgaatgaatgatagtattgtttactaaaactggaatcacaggaaaatagacaggtttgcctggtgaagagaagttcaattttagtccttggtaagtaacgttataaggaattcttatttcaggagttgggggtagatgaaagggaaacagcttgcctttctatgggtgtgtatatatatatacatatatatgtacatatgcacatatatatgtgtatatatatacacatacatatgcacatatatatgtatatatatacacacatatatgtatatgtatgtgtatgtatatatatataatgcttgagatttaattttgtagatggaaattgaagctgtggaagcagataygatcacccaaggatagcagatagaagaggacctaagacagaattttgaggaatattagacagaaacagaaaaatggtacttaaggaagagtggtcagaaagataggaagtaaactagtttgggagcaaagagaagaaaatagtactagaaaaaagagatgttaacagtgtcaaataataggagaaacctcaagtgagataaggcctgagaaaggtccattagctttaggaacaaggaaatcattggtgatcttagcgaaagcagtttccttttgtggtgaaaatagaaaccatagtgcagggattgtgaatacatgaagaaaactctttcaagacttggtttttaaaccaaggagaatggtggtcattggaattagaggaagggkgtgtrtgtgtgtgtgtgtgtgtgtgtgtgtgtgtgtgtgtgtgtgtttcttaagatgggagacaaatatagttaatgctgttgggaatgtgtgagataaagaatctacgcatgagaacataggagaagccagtatawtggcagaactaagttttatagaagacsagagagagagaaagcattggttgatgcatttgaagatgtttaagacagagyggaaggaagttcagagagtactgcagaaaggtctggagtggagggaagcagtgggagatggcctaggaaagagagggagtgagcacattattactgcataaacaactaaatttcacatctccctttcttactatttggagcaacaagatcagaaccttgagtggaagtagccactgatgtgggtgtgttcttatgtccgtcttcctaattcctgtttatgagaatagttttgttgttgttgtttttgtttttttgagatggagtctcactctgtcgtccaggatggagttgcagtggctcgatctcagctgactgcaacctctgccaccctggttcaagtgattctcctgcctcagcctcccgagtagctgggattacaggcttctgccactatgcccgctaatttttgtattttcagtagagatggggtttcaccatcttggccaggctggtcttgaactcctgaccttgtgatccacccgcctcggcctcccaaagtgttgggattacaggcgtgagccaccgcgctttgctgagaatagttttaaaatttcttttatgctaatgacttggtaatttttttttctagtttccattacagtataaaacagtttcttgactgtggtgtttttgtttctgaattcattaattctgctaattttattatttccttccaattacttcaaatttcctttgaggctctttttatttttaattcctttagatggatgcttagcacaaatgctattttctttttttttttttttttttttgagacagtctcactctattgcccaggttgaagtataatggcaggatcctggctcactgcagcctccgcctcccaggttcaagtgattctccctgcctcagcctcctgagtagctgggattacaggcgtcagccaccatgcccagctgatttttatatttttagtagagactgggtttctccatgttggccaggatggtcttgaactcctgacctcaggtgatccacccacctctgcctcctaaaatgctgggattacaggtgtgagccaccacgcctggccaacagatgatattttcatcactgtttaacatacatacttaaaactttttctgccggtatgtttctttcacccatggttgtttagaagtgtgtttcctgattcttaacatatagacatttattttaattattttttggttgagttctagctgaattagttagaaaatgtgttttgctgggcatgatggctcatgcctgtaatcctagctactcaggatgctgaggctggaagatcgcttgaggccaggagttcgagatcagcctgggcaacatggcgagagctcggtctcaaaaaaaaaaaaggaaagaaaatgtattctttatgatcaaagtaccttaacatttgtcaagacttaagatgcggtccatttgattttttaatgtccaaattgagttttagaagagtacatattctttagcttttgagtgtagtgttctctacatgccaattgtgacagatttgttaatgctgttctaaaatccatatctattatgattttttttttctgattgccattcaggaaactaagagtagatttacttctgttagtttttgttttatatattttgaaggtatgttattggatgcatattaattctaaattgttttttcatggtgagttgaacctctgtcattataaactgactgtctttagaaataatttaaaaagccttttttgcttgatattaatacaactgtaccaggtatctttttgttagtattttcatgaaaaatcatttttccttcttactttcagtctttgtgtttccttatattttagatgtgtctcttataagtattatgtaatacttacatttgctttttaaaaaaatttgggattgcttctagtatttattatttttgttttgagttatatgtcttaagtttttcattaatattttttattgatgcataatagatgtacatattttcagagtatgtgataattttgatacattcatataatcaaatcagggtaattagaatatctctcaccttaaatatttaactttatggtagaaatatttgaattattctcttctagctattttgaaatgtgtaatagattactgttaagtatagtcattctactgatctgtgaaacaccattygtatctattaataaactgctcttcatcatcccccaccccaccttcccagcctctggtacccacaagtctattctctatcttcatgagagccacctttttttttttttttctttttctaccttccacatatgagtgagaacatgtgatatttgtctttctctgcttggcttacttcactaacatgatgacctccagttccatctatgttgctgcaaatgacagaatttcgttctttataatggctgaataatatttcagtgtgtgtgtctgtgtgtgtatgtatgtgtgtgtgtgtgtgtgtatatacataccacattttctttatctgtttatccattgatgggcacttgggtttattccatactttagcaaattttgtatagggctgcaataaaatgggagtgcaaatatctctttgatatattgatttcctttcttttggatatttacgcaatagtggaattgctggatcatacggtagttctatttttagtttttgagaaatctccatactgttttccataatggctgtattgatttatgttcccaccagcagtgtttaatagttgagcctactctcctttttgtctacatccttgtcagcatatgttgttttttggtcttcttgataatagccattctaactgggataggatgatgtctctgtggttttgatttacatttcgttgatgattagtgatgttgagcatttttaatatatttcttggtcatttgtatatcttttttgagatatgtcttttcatcatttgcctatgttttaatagaattatttgttaaactgtcttttaaactagctcactctttcatgtttcccagctctctaatctggaattaattctttctattgagtttctaatttcaagtattatatttttcatttctagtttatttaccttctcagaaatcttttgtcttttttttaaaaaaatagttttctgttttctgcagtatttccaaccctgttttttatgtctttagatataaatatagttatttattttctgtgcctgattccaatatattaagtttttgagtttgtttctgctttctaatacctttactggttctttttcatgataccttgttttattgtgtcattttttaaatttgaaaaattaaataaggctttgggctctggaatgatcttgtaattattcttccaagaggaactttgtttgcttatgctgtgcatttgaggtcacttacaagcctggcaccagtttgggctaagtcaagatttaaaatgttttgaatacaccagtcaagataatttggactgtaactgtatgcagtggcttgcttcaggctatggtgtctcaggtacagaatcccctggcctcctttcagtgccaaggcaattttagttggagttctctagagtaggaaagattgggtgagtttacttttctttcccttttatgttgagaattcaaacttgttgttagaattggattgtctattagatcccctaccttgagcaggcctggactctgtcttctttcctcttgaatttaaaaactacattactgttttgctctgagttcatattaaaggctctgagttatctatttccacatacgtcatgcataaaatatctccttttaccattttcacttcattttattctttaggcggaacagtaatgagtgttaccccatttctccattttgctgatcagaggagctaattacaggctaaggccctcccaagcgtggctctcatttttctgcttcagtgaatatagtatcccacaatatttttgtaggtatagttccttggtgtgctgggttagacttaggatcctgagaggtatggctgtcagatcttaggagactgtattgttacagttggtctctaggatcatgggagcaagaccctgcatcagtctagcaaagataaaggttttggtaagttttatgtgagtcaggaaaagccttcaatccacaggcacatttcacagtacttttttttttttttttttaaatctgagcgcctcgttcagaagaaacgagaggggctggaagagccctttgtagaccattgcaccgttttttgccaaggaggtgtgtcatattcttgtgtaccttcagcctctagagaatacactgtggtccatgaacacttgaatgtttctaggtggatctgagttctacttgacatcatggcaccaagaaaatcacttggattgttttttttataccctgctttagaggaacaaattatataaatcatacctcgactagaaagaaggtgaaaaataaaatgttcgggtagattatcacagggtggataagaaaatgcatcattatagaagcctgatgctggagaacagagggtaatagacactatccaaagaagatttgattgcatacctttgcagtttaaatgggaagcctggactagttttcaatttggattgaagccctccattttcattcatctgtctctttttttctttctctttctctccctcctctctctctctgtctctctctctctctcacacacacacacatacacacacatacacgtgcacacacacacacacattctactcacacactttaacacttaggactactactctaagccaaattgtatttggctctctcctggctttcaacactggaggttggcaagttggagaactggtatacttaccagccagggaattctgtaatccatggccgtggcaccctgctgctagaaaaggaataggattggctctcccaagtgtagataatggatcataaagtctttggaaaggccttagagtacctttctgttttgcctgaattcctctttttctccctccagcttactttatgaattcttagttttaactatgtaaagtcaatgttgattctagtaattcacatgaatagtttatcacttatgcctgattaaaatgtagaactgcaataatgattagtaataatcaggtacattattaaataagtctcaggttaatattttaaatttcatataatatggtaatttatcattcacagatgcacatttaaaaaagttattgctcaacactgtaacaggaacattaattttaaaaaatctaataactattgaggaaactaatagtagcatacctttccttatatacagcttttaaaatatgattctgagtgaagaacaggcaaaagagcctactctgcctactactctgttgtcctcaggaagccaaaggartagagagaagaggagatatacaccattatcgcttttgcccatgaaaatggtaggccacctaccattctcatttttgtctattaattttgacattgaaatacattctagatttttaaaagtgagtctttttgaaataatagagaatcagtttgaacacatttgaaatatgtatttcagtgtacactcagaatattttaaatagattataattaaaatccaaaattttaatatatcccaaacttaatagtttataagtcttttataagtcaaacaaagttaaactttataagttgaagataacaaagtttagatggttgatgtagtatggtggtatcatggtggtgatggtaggggtttttgttttgttttaaatgctgagaactttattaaatttgtggaattactgagtaaacactaggtggtgcagttgtgcaaggaccatataatgaagtatgcattttttgaaaaaaggtgtcaggatgaaattaaaattatagtttgaagaaactctttggaaataagaattatcaaaatactaaaatagaatgaatgaatcttgctttgctattacttggtctgggatttaaatggggacctatcttgtgatttacactagaagtctcaagctattggtatattgtttgtattgcattttaagctcagctaaccataccaccctccccagagtacaaataaagtacataaaatataaaagaaaatacgacaacaaaaaactgatccaatttggttttctgtaaaatttaaatattaaattgctctctgactacaattaaagaggcttaccttctactatttcaaattattctaaaatgccctaggatttgagtaattttctgtaatattatatctcatcgagtaattgttgatcagttaaaacttgaaaagtagctttccttttggcctatgtgtcttcttttattcactgaaaaaacccttgcattcctatgtatattcaagtcattaaattattaaagaatcagcttctgcaatgaaaaataattattattgttttatttatatgttgaaataaagtaaaaaaaaattatatggataataatttaaagccttaagtcttaatttggagaggttttattttccttttaagttattttccaatttgagacacaatactttttgggaattaaaaagaaaagccatctgtgttttcccgtgattttgtgaataatgtttctgttacatttgtatttaaatatttttcaatatttttgaagcacaaaataaggctgtcttatcatttcaaagcattcaatggtcatcacagaaaatcaggatcaatttaagtacttcagtaggctattataactgacagaattacacaaactatatgtgtattcgtatatgttatttttctgtgaataagataatgctctctcagatgcagagtcatacaaaactgatttttgtacttcactaatgtagtgaaacaatataggatataaatgattttcttttaaaacttattttccattaacaaacaactgtacaaaaatcacagcatttttggaaatctagatttatgttttatgaaattctttcactataatgttttactacttctcttcaaaactaccacctttagtatttttcttttgaatatttgatatttttattttgaggtaatgtttcattgcttatgaataaattattacacatttatttcagaatatgttcaagtttccttatatataagaataattagattttttactagtaattagcagaggaggtttgaagggaagaggtgttttccttctgtttgtgaaacagatgtatatgtgcacagactcatggacatacatatgcgtcagagactgcctgggattactgtaagtccaggtggctgggccattgctcatggtttgtttgatgatatatattttcattttaaatttattttaagtttcctttgaaacttttggaatgaaacatgtaattaatattttaaaaatacatatttagtatttgagtaatgcaagccagttttagacaaaatgttacagaaataatttgtggaattgtaaaatcactatttttgtaatagttggagcctttataaagttacttgctgctttgcagatataaccattatcgcaattgccactatttaatggtacccatggtagctacattacccagggggctgaatagccatgaaaatgggagtaacctctgacctcagaaatcgttcttttaaaagaggattgaaacattggtgataggaaatttgaattgctcttgcagctgcagtgtttgttctgtgaatacttaatttagtttagagctatactttctcgtccaaatctgtcagtctttcagaagcatcaaattcacttcaggaagaaaaaaaaaatgcttccttcccaggcctgtattattgaatgcagtattcaggcttcaaatagtttcatttaggtaatayatatagtctcaagaatgggagtcctcacatttgacacgctctgttaaatatatagttcattcaaaccccgtccaagatattgctatgcagtcacttattttggataatccttttaatgactataactcaactccttagctatatagagaactgatagagagtgtgtgtgtgtatgaattaatatataaacatatatgtgtacatatacattatgtaaatatgtttaggctttataaagaatttagatttttttataaaatttgaaagataaactatgtataaactgtgaaggccttatgttgggtgcatagagagttacacatagaatactcattaaggtaatgggattgctatgattaattcttacatgctgactgaaaatgtagcccagagagatttggaagtgatgtcaaaaaagcaggttggtctgtggtcttattagtttgatgttattaactagttggtatggcactggcttttacatgactcttatcgccttacctttaacattaaataatgcatttattgataagagaagggggaaataagggcagaaacccagcatttgctggtttaataacaaacgggcaaaatggaaacatttgctatatacttcaatatttgttattttacttttcattatgataaatggttttgaaaaaacaagaaaggatgttatggtggaaaaaccagtatttatgagagtaatctgaaatatgcttctttttcaacattacacaattaagaataatgtgaaatgaaaaaccatgtataattgtaacttattttattatacactgtattgcattataaatcttgatagtaacaagccatttgtttgcatgcagttttgaaaaaaacaaaggactactgaagcccatttgggttaaaatgcttattaggctgggcatggtgtctcatgtctgtaatcgcagcactttgggaggccaaggtgggtggatcacttgaggccaggagttcaagactagcctgaccaacacggcaaaaacctatctctactaaaaatgcaaaattagccagatgtgatgacacatgcctgtagtcccagccactcaagagtctgagggaagagaatcacttgaacctgggaggcaaggtttcaatgagccgagatcatgctactgcactccagcctgggccccagagggagagtctaccagaaaacaaaaaaacaaaaaccaccagcctgggcaacatggtaaaaccccatctctacaaaacaaaaacagaaaaacacaaaaattagccagatattgtagtgtgcacctgtagtcccagctacttggagggaggatcacttgagcctgagaagttgtggctgcagtgaactgagatcgccccactgcactccagcctgggcaacagagtgagactctcaaaaacaaacaaacaaacaaacaaacaaaaaaaccactatatcaaaatggatccaattaaaaactgaaatatagaatttaatcgttttaattaggaaaatgtataacagttctagtttgctactttttgcatttcatatttaacataagcagttacatacagagacacgtttataaacacatataatataaaacagtctcatatattttctggcacatcattagtatctccttatgtcttaaggtttagaggtgcttcttggtgaacactgagtgcattccttagacaaccataaggggggtcttctatgtcaacaagttgctctcattactctccttatcccaccatgagaggaggtctttataccaacaagctgctctgtttgaacagtgtgtacataattatctactctgaaggtgaacgttttgtgtaatgaattttctgaattccataactcttaattcattagaataattgtgtttgcactaattgtttatactctgactttatatgagtttaaataacctagtaataaaacagaaatattttgatgttttagaagaatattgaggccaaataaatatttgtctattgtttataaaaataattagtaaattaaatactatttctaatgtagaaaacttgtttttgtcttgaatatacttatacatagcatctttaagtcacctttaagtagtgataccgaaaagcttctatgtagttaataaaagtaattgtttttaaaatttaattctcaagagactattcattgcatagctcttggaacataaccttttaatggaatatcctgcttttatttaacattccaatgagaatggcgaaattattaaattaagtactaaagaatgcaaaacatgtcctgaataactcaagagatgactaattattatttatctactcatccatctatctataaataaatggcaatacttaatagaattattggttcacattctgtgattatctatagatgatagaatagtttactggaaagaaatatattactaaaaacttaagttgatacataatcaaagttttacctgagttttatttttttattattttttttgagacagagtcttgctatgtcacccaggctggagtgcagtggtattatctgagctcactgcaacctcctcctcccaagttcaaatgcttctcgtgactcatcctcgcaaccaattacaggcatgcgccaccacacctggctaatttctgtatttttgagacagggtttcaccatgttggccaggctggtttcaaactcctggcctcaagtgatctgccctccttggcctcccaaagtgctgggattacgggcatgagttgaatttttttttaaccatcatttgtggaacagatattattcagtgaagtcagtttagtttaactacatgttacagaagcattggcaatgcaaaataatttctgtctgctttcaccttgtaatatctgtacaatttttacttcaagtgaaaaaggggctttagctatcaaaagccagattatgatgagataatgcagtttttcacataaatgtaaattatgggttaactgtcttagtagaaaatataaatttttaaaaactaatctaattgcatattggggaaagtttcacttttcatcaaatactatttttgataaaatatgtttaaatattttagcaacaaacatttaaacaatattctttaatggtatgttaaaggtctaggagacttggattcaagaattgcaaaggagaaaattgagaaaagtctgagaaatagacaccagctgtgaattttaatgactggtgttatattgttttgaaaatattttcactaaccacagttattttgcaagtcaccttacataatttttcagaagagaataaaagtgactgatttctattgataggatactgactctcagagctattatataatgaaattctatcagactagttttatcttttctgctactttattactctgaaaaatataagtctttataactgctgagttcttgtcagtttgaaaatacatgtcaaaatatatatgctttaaaaatattttccttgaatgatgcatgaatgtttttaaaggaggtgttgacactagtgattttgatggttgatattaagctataaagaaaatatacagaatgatgcaatatatttaaagcagatttatgttagtatatgctaaaagttaggatatggaaatcatctttatagctgggcaaacttgcttgtatgaatttctctcccatagaatgtgcaaaacaatttgtcaaaggcaatttttttattataaagggatggcttcaaatattttaaagttatgaaagctctaaactcaagtagatttcagcattctaattctgtgggatactcacatttctcagtgtttcttctttttctacactagcatattaatgaattcatgtagagtaagtcaatttttattttaatatcttatttggggttctgtacatctaattttgtaatttttcatgttatttttaataatattgctgacagtaatttataaatacttgattacagctgagggattatcttttatttgtttaaaggcaggggcttgaattgtgttactcttgagatctctttctcaacattataagtatacttttctattgtacataatgttctttaaagtttaagatttattttgacctatctgaaattaaaaaaaccccaaaaccttgttttttagcgcatattataagatgattgcaaatttatcagattcagattttgccatgcgggacttatgctcttgttcggcagagatggcatttgtttattcattcattgattaatttatctgacagcaaatatttatagaacatttactatgtttaagaacctgggtataaaatagtaagttacctgttatggctcaagttgcttacagttttgtgsaggagacaaacaagtaaatacgtagttaaaatcttaagtgtgtaagatgatgttatgattgaggaaagcacaacccatctaactgaatcctagtggggcctgatgttggggaaagctccctggagaaagttttggctaatctgaggcctagcgtgtgtaagcattagtcaggagaagggttggaagagggaggaaagcagggataggtaagtgcatttcagattaaatgatatgtaaaaaggcaaagagtctagggaacatggtatgactcataggaccctaagacttcagtgttcagaggtgaggccagagttgtgagtaaggatcatttcatgcatggtcttgtgtatcatcagaatttcatccttggtgcaatgtgtagtcattaaggcttttcagagaagtgacataattgttttttggaaaaattgccctggcaacaatgtggagaatggattcgaaagagtcaaattagaggcagggatacaaactttctgagttattacttgagaggcattatcagcataaactatgatggtagcagtagggatgaagaaaactagatgtatttgtgaaatatttaactagtaacagcaagagagttgatttactagatatggaggtttgtggaagaaacagtagtaaaggcggcacaaatttttgttaaagataactaggtggttggtgcttccattcaatgggattggaaccaaggaaggagtctgaaagcaaaaaatgtgaattcagctttagaaatggtgagctgggctccacagctcaggctcctaattccagtactatgggaggctgaggcgggtggatcacttgaggcccagagtttgaggccagccaggccaacatggcgaaaccccatctctcttaaaaatacaaaaaaattggctgggtgtgggggtgcatgcctgtaatcccagctacttgggaggctgaggcacaagaatcatttgaacttgggaggcgaaggttgcagtgagccaagatcgcgccactgcactccagcctgggtaacagagattccatcaaaaaaaaaaaaaaaaaaaaaaagcatgaagaatctgagatttttaccatttttttttggttgtttgtttttatctttccatttatttatcttccacctatccattaatccgtcttatgttctgatgcacttctgatgcacttcaaagtatattacagataatttttttttatatttaattttctgtccttgcgatagtttgctcagaatgatggtttccagcttcatccatgtccctacaaaggacatgacctcatccttttttatggctgcatagtattccatggtgtatatgtgccacattttcttgatccagtctatcattgatggacatttgggttggttccaagtcttcgctattgtgaatagtgccgcagtaaacatacgtgkgcatgtgtctttatagcagcatgatttataatcctttgggtatatgcccagtaatgggatggctgggtcaaatggtatttctagttctagatccttgaggaatcgccacactgtcttccacagtggttgaactagtttacattcccaccaacagtgtaaaagcgttatttctccacagcctctccaagacctgttgtttcctgactttttaatgatcgccattctaactggtgtgagatggtatctcattgtggttttgatttgcatttctctgatggccagtgatgataagcatattttcatgtgtctattggctgcatagatgtcttcttttgagaagtgtctgttaatatccttcgcccagtttttgatgggattgtttgactttttcttgtaaatttgtttaaattccttgtagattccagatattagccctttgtcagatgcgtagactgcaaaaattttctcccattctgtaggttgcctgttcactctgctggtagtttcttttgctgtgcagaagctctttagtttaattagatcccatttgtcaattttggcttttgttgccattgcttttggtgttttagatatgaagtccttgcccatgcctatgttctgaatggtattgcctaggttttcttctagggcttttatggttttaggtctaacatttaagtctttaatccatctcgaattaatttttgtataaagtgtaaggaagggatccagtttcagctttctacatatggctagccagttttcctagcaccatttattgtaatagggaatcctttctccatttcttgtttttgtcaggtttgtcagagatcagatggttgtagatgtgtggtattatttctgagggctctgttctgttccattgctctatatctctgttttggtaccagtaccatgctgttttggttaccgtagccttgtagtatagtttgaagtcaggtagcgtgatgcctccagctctgttcttttggcttaggattgtcttggcaatgccgggtcttttttggttccatatgaactttaaagtagtttttccaattttgtgaagaaagtcattggtagcttgatggggatggcattgaatctataaattaccttgggcagtatggccatcttcacgatattgattcttcctatccatgagcatggaatgtttttccatttgtttgtgtcctcttttatttcattgagcagtggtttgtagttctccttgaagaggtccttcacatcccttgtaagttggattcctaggtattttattctctttgaagsaattgtgaatgggagttcactcatgatttggctctctgtttgtctattattggtgtataggaatgcttgtgatttttgcacattgattttgtatcctgagactttgttgaagttgcttatcagcttaaggagattttgggctgagacgagggggttttctaaatatacaatcgtgtcatctgcaaacaggaacaatttgacttcctcttttcctaattgaataccctttatttctttctcctgcctgattgccctggccagaacttccaacactatgttgaataggagtggtgagagagggcatccctgtcttgtgtgagttttcaaagggaatgcttccagtttttgcccattcagtatgatattggctgtgggtttgtcataaatagctgttattattttgagatatgtcccatgaatacctagtttattcagagtttttagcatgaagcgctgttgaattttgtcagaggccttttctgcatctattgagataatcatgtggtttttgtctttgtttctgtttatatgatggattatgtttattgatttgtatatgctgaaccagtcttgcatcccagggatgaagctgacttgattgtcatggataagctttttgatgtgctgctggattcagtttgccagtattttattgaagatttttgcattgatgttcatcagggatattgatctaaaaagttgtgtctctgccaggctttggtatcaggttgatgctggcctcataaaatgagttagggaggattacctctttttctattgattggaatagtttcagaaggaatggtaccggctcctctttttacctctggtagaattcggctgtgaatccacctggtcctggagttttttagttggtaagctattaattattgcctcaatttcagagcctgttattggtcaagtcagagattcagcttcttcctcatttagtcttgggagggtgtatgtgtccaggaatttatccatttcttctagattttctagtttatttgtgtagaggtgtttgtagtattctctgatggtagtttgtatctctgtgggatcggtggtgagatcccttttatcattttttttgcatctatttgattctcctgtcttttcttcttttttagtcttgctagcagtctatctgttttgttgatcttttcaagaaaaccagctcctgcatttattgattttttgtagggttttttgtgtctctatctccttcagttctgctctgatctttgttatttcttgccttctgctagcttgtgaatgtgtttgctcttgcttctctagttcttttaaatgtgatgttagggtgtcgattttagatctctgctgctttctcttgtgggcatttagtgctataaatttccctctacacactgctttaaatgtgtcccagagattctggtatgttgtgtctttgttctcattggtttcaaacacatctttatttctgccttcatttcgttatgtacccagtagttatttaggagcaggttgttcagtctccatgtagttgagcagttttgagtgagtctcttaatcctgagttctaatttgattgcactgtggtccgagagactgtttgttataatttctgttcttttacatttgctgaggagtgctttacttccaactatgtgggtcaattttggaataagtgtgatgtgatgctgagaagaatgtgtattctgttgatctggggtggagaattctgtagatgtctattaggttcgcttggtgcagaactgtgttcaggtcctggatatccttgttaactttctgtctcatcgatctgtctaatattgatggtgaggtgttcaagtctcccattattattgtgtgggagtctaagctctttgtaggtctctaaggacttgctttatgaatctgggtgctcctgtactgggtgcatatgtatttaggagagttagctcttcttgttgaattgatccctttaccattatgtaatgmccttctttgtctcttttgatctttgttggcttaaagtctgttttatcagagactaggattgcaacccctgcttttttttgttttccatttgcttggtagatcttcctccatccctttattttgagtctatatgtgtctctgcacatgagatgggtctcctgaatacagcacactggtgggtcttgactttttatccaatttgccagtctgtgtcttttaattagagcatttagcccatttatatttaaggttaatattgttacgtgttaatttgatcctgtcattatgatattagctggttattttgctcgttagttgatgcagtttcttcctagcattgatagtctttagaatttgacatgtttttgcagtggctggtaccatttgttcctttccatgtttagtgcttcctataggagatcttgtaaggcaagcctggtggtgacaaaatctctcagcatttgcttgtctgtaaaggcttttatttctccttcacttatgaagcttagtttggctggatatgaaattctgggttgaaaattcttttctttgagaatgttgaatattggcccccactgtattctggcttgtagagtttctgctgagagatccgctgttaatctgatgggcttccctttgtgggtaacccgacctttctttctggctgcccttaacatattccttcatttcaaccttggtgaatctaacagttatgtgtcttggggttgctcttcttgaggagtatctttgtggcattctctgtatttccttaatttgaatgttggcctgcctcactaggttggggaagttctcctggataatatcctgaagagtgttttccagcttggttccatctccccatcactttcaggtacaccaatcagacgtagatttggtcttttcacatattaccatatttcttggaggctttgtttgtttcttttcactcttttttctctcaacttctcttctcgcttcatttcattcatttgatcttcagtccctgatcccctttattccacttgatggaataggctactgaagcttgtgcatgcgtcacgtagttctcgtgccatggttttcagccccatcaggtcatttaaggtcttctctatgctggttattctagttagctgttcgtctaattttttttcaaggtttttagcttccttatgatgggttcgaacatcctcctttagctcggagaagtttgttattaccgatcttctgagcctacttctgttaattcatcaaagtcattctctgtccagctttgttctgctgctggcgaggagctgcgatcctttggaggagaggaggtggtctgatttttagaattttcagcttttctgctctggtttccccccatctttgtggttttatctacctttggtctttgataatggtgacctacagatggggttttggtgtggatgtcctttttgttgatgttattcttttctgcttgctagttttccttctaaccatcaggaccctcagctgcaggtctgttggagtttgctggaggtccactccagaccctgtttacctgggtagcaccagtggaggctgcagaacagcatatattacagaatagtaaatgttgctgcctgatccttcctctggaagcttcatcttagaggggcacccagctgtatgaggtgtctgtcagccctactgggaggtgtctcccagttaggctactcaggggtcagggacccatttgaggatgcagtctgtccattctcagatctcagactccatgctgggagaaccactgctctcttcaaatcgtcagacagggatgtttaagcctgcagaagtttctgctgccttttgttcagctatcccctgcccccagaggtggagtctacagaggcaggcaggcctcgttgaggtgtggtgtgttccacccagttcaagcttctgggctgctttgtttacctagtcaagcctctgcaatggcagatgcccctcccccagcctcgttgctgcctcacagttcgatcttggactgctgtgctagcagtgagcaaggcgccgtgggcgtgggacctggcgagccaggcgtgggatataatctcctggtgtgcggtttgccaagaccattggaaaagcacagtattagggcgggagtgtcccgatttcccatgtactgtctgttactgcttcgcttggctaggaaagggaattccccaaccccttgcacttcctggatgaggcaatgccccgccttgctttggctcacactgtgtgggctacacccactgtccaataagtcccagtgagatgaacacagtacctcagttggaaatgcagaaatcacccgtcttctgtgtcgctcatgctgggagctgtagcctggagctgttcctatttggtcatcttggaacctgagctgaccatattttcaaaccaacaatttggcctgccagttgcatggatcctgttagaaaatatgaccttgggtcagagatgaaggacagtttattactcacagtaacagagtagctgaggtatcaacatttttgcactggctctctgaaccttaattaccttaaagtgacatgaaaagggccagataacacatgtacatacagtgggctgcattataggaggggaactccaagcttaagaaacccaagtcttttataccgtacataaagcatacctgccctgaaataaagatgttctttgaaaccaatgagaacaaagacacagcataccagaatctctgggacacatttaaagcagtgtgtagcaggaaatttatagcactaaatgcccacaagagaaagcaggaaagatctaaaattgacaccctaacatcacaatgaaaagaactagagaagcaagagcaaacacattcacaagctagcagaaggcaagaaataactaagatcagagcagaattgaaggagatagagacacaaaaaaccctacaaaaaaatcaatgaatccaggagctggttttttgaaaagatcaacaaacttgatagactgctagcaagactactaaagaagaaaagagagaaaaatcaaacagatgcaataaaaaatgataaaggggctatcaccaccgatcccacagaaatacaaactaccatcagagaatactataaacacctctacacaaataaactagaaaatctagaagaaatggataaattcctagacacatacaccctcccaagactaaaccaggaagaagttgaatccctgaatagaccaataacagggtctgaaattgaggcaataattagtagcctaccaaccaaaaaaaatgtcgaggaccagaaggattcacagccgaattctatgagagatacaaggaggagctggtaccattccttctgaaactattccaatcaatccctaactcattttatgaggccagcatcatcctgataccaaagcctggcagagacacaacgaaaaaagagaattttagaccagtatccctgatgaacatcaatcaaaaaatcctcaataaaacactggcaaaccgaatccagcagcacatcaaaaagcttgtccaccatgatgaagtcggtttcatccctgggatgcaagcctggttcaacatatgcaaatcagtaaccgtaatccatcacataaacagaaccaaagacaaaaaccacatgattatctcaatagatgcagaaaaggcctttgacaaaattcaacagcgcttcatgctaaaaactctgaataaactaggtattggtgggacatatctcaaagtaataaaagctatttacaacaaacccgcagccaatatcatactgaatgggcaaaaactggaagcattccctttgaaaacttgcacaagacagggatgccctctctcaccactcctattcaacatagtgttggaagttctggccagggcaatcaggcaggagaaggaaataaagggtattcaattaggaaaagaggaagtcaaatcgttcctgtttgcagatgacacgattgtatatttagaaaaccccctcgtctcagcccaaaatctccttaagctgataagcaacttcagcaaagtctcaggatacaaaatcaatgtgcaaaaatcacagtcattcttatacatcaataatagacaaacagagagccaaatcatgagtgaactcccattcacaattccttcaaagagaataaaatacctaggaatccaacttactagggatgtgaagaacctcttcaaggagaactacaaaccactgctcaatgaaataaaagaggacacaaacaaatggaagaacattccatgttcatggattggaagaatcaatatcgtgaagatggccatactgcccaaggtaatttatagattcaatgccatccccatcaagctaccaatgactttcttcacagaattggaaaaacaactttaaagttcgtatgtaaccaaaaaagagcccacattgccacgtcaatcctaagccaaaagaacaaagctggaggcatcatgctacctgacttcaaactatactacaagtccacagtaaccaacagcatggtactggtaccaaaacagagatatagaccaatggaacagaacagagccctcagaaataataccacacatctacaactatctgatctttgacaaacctgataaaaacaagaactggggaaaggattccctatttaataaatggtgctgggaaaactggctagtcatatgtagaaagctgaaactggatcccttccttacaccttatacaaaaattaattcaagatggattaaagacttaaatgttagagctaaaaccataaaaaccctagcagaaaacctaggcattaccattcaggacataggcatgggcaaggacttcatgtctaaaacaccaaaagcaatggcaacaaaagccaaaattgacaaatgggatctaattaaactaaagagcttctgcacaggaaaagaaactaccatcagggtgaagaggcaacctacagaatgggagaaaatttttccaatctactcatctgacaaagggctaatatccagaatctacaaagaactcaaatttacaagaaaaaaacaaataaacccctgaaaaagggggcgaaggatatgaatagacacttctcaaaagaagacatttatgcagccaacagacacatgaaaaaatgctcattgtcactggccatcagagaaatgcaaatcaaaaccacaatgagataccatctcacaccagttagaatggcgatcaataaaaagtcaggaaacaacaggtcttggagaggctgtggagaaataagaacgcttttacactgttggtgggaatgtaaactagttcaaccactgtggaagacagtgtggcgattcctcaaggatctagaactagaaataccatttgacccagccatcccattactgggcatatacccaaaggattataaatcatgctgctataaagacacatgcacacgtatgtttactgcggcactattcacaatagtgaagacttggaaccaacccaaatgtccatcaatgatagactggattaagaaaatgtggcacatatacaccatggaatactatgcagccataaaaaaggatgaggtcatgtcctttgtagggacatggatgaagctggaaaccatcattctgagcaaactatcgcaaggacagaaaaccaaacactgcatgttctcactcatagctgggaattgaacagtgagaacacttggatactggaaggggaacatcagacaccagggcctgtcgttggttgggggtggggggagggagagcattaggacgtatacctaatgtaaatgacgagataatgggtgtagcacaccaacatggcacaggtatacatatgtaacaaacctgcacgttgtgcacatgtaccctagaacttaaagtaaaaaaaaaaaaaaaagcatgcctgccctttgctctgttagtaaactagcttgattttctaagactgcttgctatttttgaaaaaatagtcaagaacraagcagtgccttgcttgcaggaatgtgagagacttctagagaattattgtccagcacctcaaaacataatttttatccttatttcactcatattcttaaaaataaaagttatttcttttcatggctgacactctaagtttatgaggaagccttgtttcattggctgtgtgttcttttccctaatctccgttcatcgaatatttattgaatactttgatacattggggaatattatagagcaaatttatgtggcatgcattctagttcatgtactcagatgagtaagcaaagaaataatcaaggtaatcctggactaggataagctcaataaagttaaaaccaaaacagaatgtgacaaaaaactgggattgaagtatgggggttattggagaagacttttaggaagaaacaacatttgcaaagagatctgaatcatgagaagcagccagccatgtaaaaaccacagggaagagatttctacataaaagaacatcaaatacaaaggctctgaagcaggaatgagcttgatattttttgaggaatagaaagcacaggtttctggaggatagtcagctatggaggaaaatggtaaaaggtgaatttggaaaggtaggtcatggcaagaggtttgagttttgttctgatatctttaacctttgttactcccctgtatctttcctcttaatttacaaatattttaggccttttccctttaaaaaattccttttcaaacagttgccactgcttctccttttcaccccaaatattttaaaatagaggagaatgaaaagatacccataatagtgttggacaacacgaaatagtgccatcaaaaattgtgaggaattcctgagagacagaagcagaaggctggaaaacaagtactcaaaatgacacacaagaaaaaacaactgtacgtgaaagtagagcctcaaaaacttcaagacttggttatagggatctgtgccttaaatagaagggctggtatggctttttttctcagttcctcctctgttctcaagttatgcacgtgcatgggagagcacatgtatgtgtgtgtacacacacacacacacacacacacagtagcaacagcaacaacagaagtatttgccctttcctgaaattcaaaagccgtacatacataaggtaagccacttatctgggaaagacttctggygtggctgttgcaacctgaggaaagcataacctgaagtgacttgggacttacctatattacagacacagatgggaggaaaaaatgaaaaggaaaggcagccttgcccaggaggaaattacattaaagtactccagtgtactttaccagtgtaaagctcttcttttttgcagttacggtgccctcaacttgcctcccttggcccacacatcttaatgtggccacggccactaacataacggcagtcagcccttctctctaggaaagagaccagatggaggaaacagagccctgtgtactcatcaacttagaccttcatttataaatatgaatgatagcccaggatcatcagacactaagaaaaccaatagctggaaaaagaagagccaagatgagcagacaatggatttggatgaaacttggaatttaaagaatagaagaatacataaaatgtattttaatcaatgattccagaagtgaataaaataagaacagatcactatccaaaagaagcaatgagagaaagagactttttattctttttagtttttatttttttaaattttattttaggttcaggagtacatgtgcaggtttgttatataggtaaattgcatgtcacagaggtttggtgtacagattattttgtcacccaggaaataagtatagtacccaatrggtaggttttctgtcctcaccctccttccaccctccaccctcaggtaggccttgggtctgttgttcccttctttgtgtccatatgtactcaatgtttagctctcacttataagcaagaatatgtagtatttggttttctgtccctgtgttagtttgtttacgataatgacctccagctccatccatgttgctgcaaaggacatgacctttttcttttttttgggctgagtagtattactttgtgtatctataccacattttctttatccagtctaccattgatgaacttttaggttgattctctgtctttactattgtgaataatgctgtgatgaacataagcatgcatgtgtctttgtggtagaataacttatattcctttaggtatataccaaattgtgtgattgctaggttgaatggtaattctgttttaagttctttgagaaatcattatctcccattgtgtaggttgtccatttactctgttgatagtttatgttgctgtgcagaagttctttagtttaattagatcccatttgttaatttttgcttttattgcattgcttttgccatcttcatcatgaaatctttgcgaagtcctatgtctagaatggtatttcctaggttgtcttccgtggttttcatagttttaggtttcacatttaaatctttaatccatcttgagttgatttttgtatgtggtgaaaggaaggggccaagtttcaatcttctgcatatggctagccagttatcccaacaccatttattcaatagggagtcctttccccattgcttgtttttgttgaccttgtcaaagatcagagagttgtggttgtatggctttatttctgggttctctgttgtgttccattggtctctctgtctgtttttgtactagtaccatgctgtttggttactgtagccttgtattatagttggaggtcaggtagtgtgatgcttctggctttgttctttttgcttaggattgctttggctattcttttttggttccatatgaattttagaatagcttttcccagctctgtaaaaaattgtcattggtagtttgataggaatagcactgaatctgaacattgcttatgggcagtatggccattttaacaatatttcctatctgcaagcatggaatattttttcatttgtttgtgtcatctctgatttgtttgagaagtgttttgcaattctcattgtggaggtgttccacttctctggtcagctttattcctaggtattttattctttttgtgtctattgtgaatgggattgcatttttgatttggctctcaggttggatgtttttggtgtgtaggaatgctactgatttttatacattgctttttatttttatttttttgagacagagtttcactcttgttgcccagactggagtgcaattgtgcgatcttggctcaccacaacctccacctcctgggttcaagcaattctcctgcctcagcctcccgagtagctgggattacaggcatgtgccaccatgcccagcgaattttgtatttttattcgagatggcgttttgccacattggccaaactggtctcgaactcctgacctcagatgatccgcccaccgcggcctctcaaagtgctgggattacaggtgtgagccactgcgcccagcctgttgattgcctttgtatcctgaaacttgcccaagttgtttatcagatcaaggagcttttgggcagggaccatggagttttctaggtatagaatcatatcatctgccaacaggaatattttgacttcctctcttcctatttggatgcattttatttctttctcttgtctgattgctctggctatgacttccattgctatgtttaataggagtggtgacagatgacatccttgtctcctggttttcaaggagaatgcttccagcttttgcccattcagtatgatgctggctgtgggtttgtcataaatggcccttattattgtgaggtacattcttttgatgcctagtttgttgagagtttttaacatgaaggtatgttgacttttatggaaagccttttctgcatttattgagatgatcatgtggttttcattgttagctgtttatgtgatgaatcacatttagtaaatttacatatgttgaaccaatcttgcatcctagggatgatgcctacttgattgtggtggattagctttatgatgtgctgctggattttgtgtgctagtattttgttgaggatttttgtgtctctgttcatcaaggatattggcctgaagttttcttttttgtgtgtgtctctgccaggcgttggtatcaggatgatgctggcctcatagaatgagttaaagaagaatcccttctcagtttttggagaaatttcagaaggaatggtactagcccttctttgtacatttagtagaatttwgcagtgaatctgtctggtctagggtcttttctggtgggtaggttttttattactgattcaattttgaaactacttattggtctttccagggatttagtttcttcctggttcagccttgggaggttgtatgttctcaagaagttactcatttctggtagatttcctrgctgtgttcatagaggtgttcataatagtctctgagggtttttggtatttctgtggggcaagtggtgacatcctttttgtcattcgtgattgtgtttatttagatcttctctctttttctttattagtctagctagtggtctatctatcttattaattctttcaaggaaccagctcctggattcattgatcttttgtatgtttgttgtgtgtgtgtgtgtgtgtgtgtgtgtgtgtgtgtgtgtgtgctgtctgtctgtctgtcttgatttcytttagttcagctctgattttggttatttcttgtcttccgctagctttggggtttgtttgctcttgtttctctagttcctctaggtgtgatgttaggttgttaatttgagatctttttaactttttgatgtgggtgtttagtcttataaacttcccatttagcatgttttcactcataagtggaagttgaacaatgagaacacatcgacacagggaggggaacatcacctgccggggggtggggggctagaggagggatagcattagaagaaatacctaatgtagatgacaggttgatgggtgcagcaaaccaccatggcacgtgtatacctatgtaacaagcatgcacattctatacatgtatcccaaaacttaaagtattaaaaaaaccaaaaaaaattgctttggctgtgtcccagagattttggtatgttgtatctttgttctcattagtttcaaagaccccctgatttctgccttaatttcactgtttaccaagaagtcattcaggaacaggttgtttaatttccatgcaattgtgtagttttgagtgattttctcagcaataatttctatttttattgcgctgtggcccgagagtgtggttgctgtaattttggtgttttttaatttgctgagggttgttttatgcccgattgggtggtcagttttagagtatgtgctatgcccagatgagagaaatgtatattcattcttttggttttgggtggagagttctgtagatgtctattaggtccctttggtccagtgttgagttcaggtcccaaatatctttgttagttttctgccttgatgatctgtctaatactgtcaatggggtgttgaagtctcccagtattattgtgtgtttatctaagtctctttgtagatttctaagaactttactttatgaatctgggtgctcctgtatggggtgtgtattgagccttttaccattatgtaatgcccttctttgtcttttttgatttttgttgatttaaagtttgttttgtctgaaattagatagcaaccccctgctttcttctgttttccatttgtttggtagatttttctccatccctttactttgagcttatgggtctaatgccatgtgagacgagtttcttgaagacagcatatcattgggttttgcttcttatccaagctgccactctatgccttttaattagggcatttagcatgtttacattcaaggttggtatagatatgtgtggatttgattctgtcatgttgttagctggttattatgcagatttgttggtgtggttgccttatagtatcactggtctatgagtttaaatgtggttttgtagtggctggtgacagtctttcctttccatatttaacactccctttaggacctcttgtaaggcaggtctgggggtaacaaaattccaaattcccttagagtttgcttgtctgaagaggatcttatttgtcctttgagtatcaaacttagtttggctggatataaaattcttggttgaaaaatcttttttttttttttttttttgagatagggtctcactccattgcccaggctgatgtgccgtggcacaatcatggctcactgcagctttgacctccccaggctcatgtgatcctcccacctcagccttctgagtagctgggaccacaggtgcatcccaccatacctggctatttttttatttttatttttgtagagatgggattttgccatgttgcccaggctggtctcaaactcctgggctcaagtgatccatccatcttggcctcccagagtgctgggattacaggtgtgagccatcacgcctggatgaaaattctttttttaaaaaatgcttaatgtaggcatccaatctcttctggtttgtagggcctttgctgacagatctgcagtaagcctgaatgggatccctttctaggtgacctgctccttctctctagctgcctttaacattttttctttcattttgaccttggagaatctgatgactatttgtctttgggatgatcttcttgggtagtattctgcaggagttctgtgcattttctgaatttgaatgttggcctctctagtgaggttggggaaattttcatggatgatatcttgaaatgtgttttccaagttgctaggtttcccttcctccctttcagagatgccagtgagttgtagatttggtctctttatataatcccatatttcttggaggttttgttcattcttttttattgcttttttctttatttttgtctgactgagttattttggagaaccagtcttcaagctctgagattctttcctcagtttggttgattcttctgttaatatttgtgatttaattatgaaattcctgtagtgtgtttttcagctctgtcagatcagtttggtctttcttacaatggccatttcactcatcagctcctgtattgttttattataatcttaatactccttggattgggttttgactttctcctgaatgttgataatctttattcctatccatattctgaattctgtatctgtcattttagctagttcagcttggttaagaaccattgctggggaactagtatgatgatttggaggtaagaagacactgtttttttgagttgccattttttgtgctgattctttctcatctttgtgggctgatgttccttcaatctttgaagttgctgacttttgattttttttttcttttatcctccttgatgtccttgggggtttgtcttgtggtgtaaggtgggttcagttgacttctggataattttaggggcccaaggctcagctcctgattcctgggctgcatgctctgactctggggagctggtatcaggcccccagatttgttctctcaccccttgaggttaggaaacttctgtgctggaggggctgaggtgttccagactactgatcactaatggtggtgccagccaaagctctttgggcagtgtcagtgggatccatgcccgtttgcatttgccagccacatggcagcatgtactctcacagtctgtggcagggcactggcaagtgcaggagtgccagcctctctgtgggcatttgcaacagtggtgatattggcatgggggtgacccagggcactggcaggtgtggggttgggattctccatgccaatgttcctgcgggtggcagtggctctgcagggcagagggcagggctactggtctctgtgcgcaggtttacagtaatggtcgacatggggcggggcgctagtggaaaagagtctggtgatctctttgtgcatgaacgtgctggtgacaatgatggtgcagtttgggggctggggcaactggtttccttgtgtgcctttaggttggcaatagcaacatgggggggggtggcaggatgtgcacatgctgacagtggtggtacagtgggtgcatgtgtaccatgcactggcagtgaatgggaggtgaggtttgcccaggtgcacatgtaccagcaaagtgatatgggggtggccatgggcgaaggggagtctgtgggtgggaggtgggcatgagcaggttagtgtgcatttgtgggggccgctctgctggagtgctctaatggtcagatccagtttgcccctgcaagagctatgatgcgagcccacgtggtaccctagtggggtatccaaggctgcactgtaagcaggcgtggtcaggctggggccccaggagaggccaggtgaagggggctgctcaggttggactggccctgtctcatgggcaagattgtcctgcactgttcaggtctgacagttcccctaaggctaaagtctcctaggggtgcctggtgagctttggggggtgtgggcatccatggccatgctccactacagatgttcccacaccaaaccctctgggctccccactggctttagttctgcccctaccactcctgtatgcagctctccctgccagttcaagtgtctgtggggattatggggcctcctgctaccagaattccagaggttcctggtgaaagcagatgaccatttacctgctcaactcaccctgtctctaggagtcactggggaccaggaacaggtcctggtgttggtagccatgtgctgtgttcccagcttccttccccttcagatcaggatttgtgtcttccctctgtccactcccagtgccatcccttcatccacccaatgccttccctctgaagatcagaaagaggtctttgaaattaaaaatataattttttaaaatatgaaactaggccaggcgtggtggctcatactcataatcccagcactttgggaggccgaggcgggtggatcacttgaggtcaggggttcgagaccagcctggccaacgtggtgaaaccccatctctactaaaagtacaaaattagctgggtgtgatggcacatgcctgtagtcccagctactcgggaggctgagacaggagaatcgcttgaacttgggaggcagaggttgtagcgagctgagatcacaccgctgcactccagtctgggcaagacagagggagactcatctcaaaaacaaacaaacaaaaagaaaagaaagaaactaaaaataatgctgtgtgtgtgtgtatgtacatagagagcaaaacaatgtaacagatctaactacagattgaagtagtaatatgacatgtaaaacaaagaaacatttacagatttaaagctaaaagacaaaatgtgacagggaagttgagacttagaagggccatcctgtaaatgcaatacaactagaaattaagaaataaaggatggcttcctgcatctaacctaaggccttagggaactattcatattagtggttggaatggggccctggaccttgcttcaaccagtctttacttgtacaagttttatatattggagtcttatataatgttttattataagaaaaagtgttctgctagaaaaaatgtttgaaaactattcatctgtgggatacatttagacttattgcattttatcctaggttctttataatttcaccccaatttgtcttttttggggtaataaagggagattatgtacaagagacaggcagaggcaatctcacatgggtatataagccagtataaggacttgaaacataggaaatgaaaatcttttgaagggccttagacaaatgatctaattcatatatttaaaatatactttttattaaatattatacataatatatgaacatataaaagtgttatatttttataggaaatggattataggtactcaaaagtcaaaacgggagtctagtcagaaagctattgaagtgctytaggcaagataagatgagggcataaactacagtggtaatagtagagatgaagaaatagaaagattaggatgtagtttagaagaagacgagccaagaagggaaaagaggacatgaagtggtgacggatagtgagatagagttcaaagggtaggtttttgtttttctttttttctctttcacttctttctcccaccttcttccctacctccctgtttctctccctgtcctcatccccctatataaaagagtaagcaattttatgtagccaccatgttgctgggaaaggaaaaagagtttgtgttaagagtgggaagattgctcacatttaagatgcattactcatattttagaaaagaatatcagaactttaaaaaaaaacccattatcctcacagtttctgtgcatcaggtatttgagaatggaccagataggccattgtggctcaagatttcctatgaggtggcagtcatctgaatgctggcctggagctggtggatttccaaggtggctcattcacatggctgacaatgatgtgctggtcattggcaagagtccagcatcccctcctcttcacatgggcttccccacaggctgtttgagtgtccacaacacagtggctggctacccctctcactctggtcagaggagacaggtgtgtgtgaatgaaggctctgagcctcacagagggctgtagcagccccatcatgaggcaaagtagtcagaactttaaaagtaggtagaagaaataagactagtgtttaataaatcagtagagtgactaaataatctattgtatatttcaaaatagctagtagagaataatttgaatgttctcagcataaagaaaagataaattttgagggtgatgggtatcccatttaccctgacttgattattacacatttatgaatgtattgcaatatcacatgtaccccaaaatatgtctattatgtgtcaaaaaattgttctaaataccttacaatgaaggaagcatgtagtgacaaaatgatgggctttggaattagacagatttgtgttaaaaatatagctacatcacttttccactttataaagtagggaaatactaccttatatggtgattagaaaatcttttttttttttttgaaatggagtctggctgtatcgcacaggctggagtgcaatagcgtgatcttggctcactgcaacctccgtatcctgggttcaagcgattctcctgcctcagcctcccaagtagctgggattacagacgtgcaccaccacgcccagctaatttttgtatttttagtagagatgaggtttcaccatgttgaccaggctggtctcgaactcctggcctcaagtgatctgcctgcctcggcctcccgaagtgctgggattataggcgtgagccactgygcccagcggtgattatagaatctaaatgagaaaatgcatgtaaagcattcaacacatagtaggggctctrtaaataactgagaagagaactttctccttgatcaaacataaaatggtaacattaaaagttttggcgattttccaaatttgccaagatttagaaacaaataaatgcaatctctaaaggcaaattgcacttttcctagcacaatcagttatttaaattataagtgagaggttaacaacacctcacacaaatgcagtttttaggaattgaccatttctttgtaacagcattcaaccttttattgagcatctttaatagaaagtacttttgagtgtgccacatattggataacgtgcaagtcacacaatgaagtttatatttgagataactaaatcatgttcagatatcaattttgtaaattaggcactttacgtaagtctaaattggagtgttcatcaaaagagaatgtatagttatcagtgcttgtgccaaatctaccacacactcatatgtattaagctgtaccagaagaaattaatactcctctggtatagcttactgtaaagcttttaatttataaatatattaaaatattttacagttaaaatatgtatatcatctaattttcattagaaaataactgacaaacagtatttattacctattgaaaaaatggcaaactgtcctttgaatacctagacatcttctcattggctggaaccaactgtgatgatttacagacacacagctgcagcctgaattggcaccaaaaccaattactgatgctgtgttatttgcagccctggccctggctaatttttcttgaaaggagggtatgggaagagaggttgcaaatacaggagtggcaagaataattgatagttcatatctattctgtcttaaaatataaaccctccctttgtcttgagaatcctctagctatcactctctctctatccacatctgtggcttcaattgcagggttggctcctaaacccgtattttcattccagatctaactcctgagctctatatctgtatttaggtgtttaacgtctatctagagctataacttagcctgccattctacagagcatgtaactcctaaataataaatgctaactgtgggcagcccagcagttttgtacctatttttaagtgccaggtgacatcatggaatgttgcaaagccaaagtgctgaattatcctggaaaaattcctggttgcacttctaatagaaaatattctttcatggaaagtgcctgtcaaggtaatatgattagctgtatcaatggtgcaacccatgtagttaaacggaccatcartttgaaggaaggataagggatgctcaccaagacattaaaggcattagcacaggagagggcaaagcacctgggatgaggcatttactcagtgttcactgctattcccatcttctaatgtgttctgagtgaacttggtaggaggtggggcacttaaaaaaatccatatagcccatatatatagtataaaaggccaaagagttctacaaggctcattactagcaacagcattcatctttcccagctctctccagaggcaaccaattttaattcttcagttatttcttctggtatttgcttccatgtttataaacaacatgcatatacttatttcatcatttttaaaattttaatttttaaccgattaccttcttactttgaaagaagagaacttaactctggagagagagcaaggggtgatacttttcttcacccattataagagttatagccaacactcctttaacaaaggacaggtaaacaagagaaaagcacagtaaatttatttaaccaaaagtcttatgtgacacaagagctttcagaaatgaagacctaaggatccagggaaaactgtctattttcatgcttaggttcaatgaagaatggacagttgtgtagaaatgtgactggacatagtggggaataatggtaatagactgagaggggaaacccagcaaggcttgtctgttcagatttatcttggcctctctgtgtagcattccttccttagaagtatggggcaggacccctgtggaatgagggtcttcaagagagaaaggagatagtaacctttctaggttttatggcttgctttgaggcagaggagttctagtgtctatgacacttgaggaagaggaattctggtttccgtgaatcacttttgggggaaaaagaggagggagacaggagagcagtagaacgtctgagataccttgcytcagagaccttcaaatcccctttaaagtgctcagcatgccagagtgccatactctggggtctagtggtctgagcctcaacaacccctacttcagcactcatcctctccccaacatacttcctttctcccctccaacatggttatgccaccatttttggttaatcaatattgtatgtttacatttttctaacgatgtaaatattcaaagcaaagcccatataatcatgtagcatactatattttttgtacaacttttttctctgcagtaaataattgcctttactttttaaatgtgcttttttaatagacctattatttcttcattcccaacttccccagaagtgtaagtcttctttaagtaagttcagaagcctcaggcctctattactctgtaaattttatttttccttgaagctatccctctgaaacttctttgctctcctgcttaaacctgaatttactgtcttcctcatgagacacagatatccttgtaggatttcctttcatcattattctggaaattcttttttctttgttcttgtgttgaatcccttatttcctggattctttttttttytaatttttaaaaattatactttaagttctgggatacatgtgcagaacgtgcggtttgttacataggtatacatgtgccatggtggtttgctgaacccatcaacccatcatctacattaggtatttctcctaatgctatccctccccttgccccccaactcccaacaggccccagtgtgtgacgttcccctccctgtgcccatatgttctcattgttcaactcctacttacgagtgagaacatgaggtgtttggttttcttttgctgtgttagtttgctgagaatgatggtttccagtttcatctatgcccctgcaaaggacataaactcattagttttttatggctgcataatattccatggtatatatgtgccacattttcttcatccagtctaacattgatgggcatttgtgttggttccaagtctttgttattgtgaatagtgctgcaataaacatagatgtgcatatgtctttatagtagaatgatttataatcctttgggtatatatccagtaatgggattgctggatcacatggtatttctagttctagatccttgaggaatcgccacactgtctgacacagtgactgaactaatttacactcccaccaacagtgtaaaagcgttcctgtttctccacatactctctagtatctgttgtttcctgactttttaatgattgctatcctaactggcgtaagatagtatctcattgtggttttgatttgcatttgtttgataaccagtgatgatgagctttttttcatatgtttgttggctgcataaatgtcttcttttgaaaagtgtctgtttatatcatttgcccactttttgatggggttacttttttcttgtaaatttaagttctttgtagattctggatattagccctttgtcagatggatagattgcaaaaattttcccccattctgtaggttgcctgttcactctgatgatagtttcttttgctatgcagaagctctttagtttaattagatcccatttgtcaattttgacttttgttgcaattgcttgtagtgttttagtcatgaagtctttgcccatgcctatgtcctgaatggtattgcctatgttttcttctagggttttcatagttttaggtcttacgtttaaatctttaatccatcatgagttaatttttgtataaggtgtaaggaagtggtccagtttcagttttctgcatatggctagccagttttcccagcaccatttattaaatagggaatcctttccccattgcttgtttttgtcaggtttgtcaaagaccagatggttgtagatgtgtagtattatttctgaggcctctgttctgttccataggtctatatatctgctttggtaccagtaccatgctgttttggttattgcagccttgtagtatagtttgaagtcaggtagcatgatgccttcagctttgttctttttgcttaggattgtcttggctctacgggctcttttttggttccatatgaaatttaaagtagtagttttctaattctgtgaagaaagtcaatggtagcttgatgggaataccattgaatctataaattactttgggaagtatggccattttcatgatattgattctttccatccatgagcatggaatgtttttccatttgtttgtgtcctctctgatttccttgagcagtgatttgtagttcttcttgaagaggtccttcacattccttgtaagttgtattcccaggtattttattctctttgtagcaattgtgaatgggggtttgctcatgatttggctgtttgtctattactgttgcataggaatgcttgtgacttttgcacattgattttgtatcctgagactttgctgaagttgcttatcagcttaaggagattttgggctgagatgatggggttttatttatttatctattttttgagacggtgtcttgctctgtcatccaggctggagtgtagtggcttgatctcagctcactgtaacctccacctctcaggttcatgccattctcctacctcagcctcccaagtagctgggactacaggcacccgccaccacgcctggtgaattttttttggtattttttagtagagacagggtttgccatgttggccaggctggtcttgagtacctgaacttgtgatctgcctgctttgggctcccaacctgttgggattacaggcgtgagccaccatgccaagccagatgatggggttttctaaatatacaatcatgtcatctgcaaacagagataatttgatttcctctcttcctatttgaatacgctttatttctttctttttcctgatagccctggccagaacttccaatactgtgttgaataggagtggtgagagagggcatccttgtcttgtgccggttttcaaagggaatgcatccagcttttgcccattcagtatgatactggttgtggatttgtcataaatagctcttgttattttgagatgtgtttcaccaatacctagtttattaagtgttcttagcgtggaggagtgttgaattttatcaaaggccttttctgcatctattgagataattatgtggtttttgtcattggttttgtttatgtgatgaattatgcttattgatttgtgtatgttgaaccaggcttgcatcccagggaggaagccgacttgatcgtggtggataatctttttaatgtgctgctggattcggtttgccagtatttgtataaggatttttgcattgatgttcatcagagatattggcctgaaattttctttttttgttgtgtctctgccaggttttggtatgaggatgatgctggcctcataaaatgagagggaggagttgctttttttttctgttgtttggaatagtttcagaaggaatggtaccagctcctctttgtacctctggtagaattcggctgtgaatccatctggtccttggctttttttggttggtagactatatattactgcctcaatttcagaacttgtttttggtstgttcagggattcaacttcttcctggtttagtcttgggagggtatatgtgtctaggaatttatccatttcttctagattttctagtttatttgtgtagaggtgtttatagtattctctgatggtagtttgtatttctgtgggatcagtagtgatcttccctttatctttttttattgtgtctatttgattcttctctcttttctcctttattattctggctagtggtctatctattttgttactgctttcaaaaaaaccagctcctggattcactgattttttgaagggttttttgtgtctctatctccttcaattctgctctgatcttagttatttcttgtcttctgttagcttttgaatttgtttgctcttctctaattattttaattgtgatgttagggtgtcagttttcgatctttcctgctttctcctgtgggcatgtagtgctataaattttcctctaaacactggtttagctgtgtcccagagattctggtacattgcatctttgttcttactggtttcaaagaacttatttatttctgccttaattttgttatttacccagtagacattcaggagcaggttgttcagtttccatgtagttgtgcggttttgagtgagtttcttaatcctgagttctaatttgattgcattgtggtctgataaactgtttgttttgatttccattcttttgcatttgctgaggagtgttttacttccaattatgtggttaattttagaataagggctatgtggtgctgagaagaatgtgtattctgttgacttggggtggagagttctgtagatgtctattaggtccmcttggtccagaggtgagttcaagtcctgtatatccttgttaattttctgtcttgttgatgtgcctaatattgacagtgggatgttaaagtctcccactatgattgtgtgggagtctaagtctctttgtaggtctctaagaacttgctttatgaatctgagtgctcctgtactgggtgcatatatatttaggatagttagctcttcttgatgaattcaaccctttaccattatgtaatgcccttctttgtcttttttgatctttgttggtttaaagtctgttttgtcagagactaggattgcaacccctgctttttttgctttccatttgcttggtaaatattcctgcatccctttattttgagcctatgtgtgtctttgcatgtgagatgggtctcctgaacacagcacactgatgggtcctgtctctattcagtttgccagtctgtgccctttaattggagcatttggccagtttacagttaagggtaatattgttatgtgtgaatttgatcctgtcattatgatgttagctggttattttgcccattagttgatgcagtttcttgatagtgtcaatggtctctagattttgctttgtttttgcagtggctggtactggtttttcctttccatatttagtgcttccttcaggagctcttgtaaggtgggcctggtggtgacacaatccctcagcatttgcttgtctataaaggattttatttctccttcacttatgaagcttagtttggttgcatatgaaattctgggttgaaaattcttttctttaagatagttgattattagcccccaatctcttctggcttgtaggatttctgcagagagatccgctgttagcctgataggctttcctttgtgggtaacccgacctttctgtttggcttcccttaacgttttttccctcatttcaaccttggtgaatctgacgatcatttgtcttggggttgctcttctcgaggagcatctttgtggtgttctctgtatttcttgaatttgaatgttggcctgtcttgataggttagggaaattctcctggataataccctgaagagtgttttccaacttgctcccattctccccatcactttcaggtacaccaatcaaatgtaggcttggtcttttcacatagtcccatatttcttgcaggctttgttcgttccttttcattcttttttctctaatcttgtcttcacactttatttcattaagttgatcttcaatctctgatatcctttcttccacttgaccaatttggctatttatacttgtgtatgcttcatgaagttctcgtgctgtgtttttcagctccatcaggtcatttatgttcttctctaaactggttattctagttagcaattcctctaaccttttttcaaggtttttagcttccttgcattgtgttagaacatgcccctttagctcggtggagtttgttagtacccaccttctgaaacctatttctgtcagtttgtcagactaattctccatccagttttgttcccttcctggattctatatcatccgccttcttgggtttatttcatcctttggtgtgacacatcctccagtaacttccttaaaaataatacatgattgttaatttttgagactttggtcctctgaatgtttttttctaacctcacactcaagtgacaatttggctagatatagaattataggtaggaaataattttctttcagaatttgaaagcacaactcctttgtcttctaacaactcccagtgttgcgattgagaaagtctgttgccctgatcctttttatgtgacctattttttttttccttctctgcaaacttttactatattttatttatctccagtattttgagatttcacaataatatgcacagggattgtatcttttgtaattcattgtattgggtacttattgatttctttcaacagagaaaatcatgtacttcagttctggggaattttcttgcattatttcttcataatttatttccttccattgtctctgttttttgtcttagtctgatgtctgactaagaatcactgtgactgatcacccaaactccttctctctctctctttctctgtacgtttctttttttcttctgggagacttcttcaaaagtatctttcaagtcttcttttgtctgtttttgttttggctctcatatttttatttccaggagttccttttctccctgttttcagcatagccttctcactctcagcaatgttttacttctaaagatgctctgatataacctctcacgagtccattttcaattttcttctgtggtagggagagatcattggccaactgtgttggcagggaagagcacctagaattctaagtattatatccacagactttcaaacagttctcttgttttcagttctaagcaaagccatttcttcagaagtacttggtgcttccagtttctgagcttttctagggttccagtacgtgtgctttttgacttcctccaccccgccattggtacttgctttctgctttctcagatctattgtcagttatctcttgcccatctgctttttaccctccaaaatttttatgacatctgttttgtggttatcttgccactagttcctttgccttttttttttctcctttatcatttttgtgagagtttgggagggagtgcaaataactacatgtgctcaatcccccatcttttcttggatggtcctctgtgtaggactttgtatatgttgccaagttatttggagccggtcttgctgccaaaggaaatcaagcattggcatataccatgtttccttgcttctaatctaccattggttgtaaggtactgttcatttaggtgcaagtttgatgaaaaaaagcaacactatattaaatgtacaccttgattataagatacataaaatttcagaaactatcaaatgtgaattacagtgactttagaattagtaaatttgtgtggatcacatgcttgatattcattttctttaaggaagtttcaggttctgaaaatgaatatatgatttctatttttattgcgatagagattttgttaaatgctagaaattttaactctcttctttgtactaaattcctggacatggttctgttttatttgccatactctgatgtaattgtattcattatttttctcctccatcccaagctccccactaagttttgatatcctcaagaacaagttctttggtttgttaacttcatattgtgaatgcctagcatggtgccactcagtggttgcacttagtagatgctttgtaaatgtaggttgaatcatactaaaaataattagaagataaaatgatatccagtgaaactcctttttttcaggtaggtatttttgagatcagactcattattttaaggatattgaatgttcatgaaagagaagcacatttattgaacagttatttgccacaaattttcaaatatgtttttccatttactcttctatgtcttaatatagaattaaaaaagcataggaaacattttttattaatctgtaacttgtttgggctttagggcaaaacatggtcataatctagaatcttccttattttattctactgatttttaaatatcaggtaataatttcctactatattagggaattaacattttaagctgtgatgatgtatgcctgtgttaaatatagtacggcgaaattgatcccttctcaggggaccttggtggtttattcacaggctttcatttcaataagaaaaggctgttctttcctaagttatctactttggttctctattcaaccattgaaacaaaatactaaaaattttatgtaagtacgracactgtgacaaaccgttagtaaagttgaaagcaaacaatcagggaagaaagagtatgaaggaagatccaattacaatattaaagaattcactgcagaattcttataaattgtgactatttagggcttgtttacatttcattaagaacttgtcataaagactaaggggctgagaacttaatgggtgccactaccaaataagggtagtcaaaatagaaataaagcttctgtgatgtaacacaataacttaacaggaagaccttaatttattgaccaatcggccataaatattaataattcatattggagcttacttttatatcatctgtgaagtttgctaagcaatagtgggaagattctttagggcataagaaatatcaaatttaatctgatatttagatacatcaatttacttataaactattgatatactaatttaaaacactccttagtcattcagttaactttctccaagagctttctaagcaaagtaaattaaagtaaaagttggtcagaagatagtttccatccatatccctttccatggattaattatacaagtctaaactgacatttgtctcaggggtcaaaaggctccatttagcacagcatttaggcagagggagagagagttgaaagagcactgcacagataatttgtggacagaaattttagtcctaattgttcctctaaygagatgattgaatttgtgcaaattactttaccctcatagatttcagtttccatatttataaattaaggggtttagggyctctcagagttgatttatgggagaggagrtacatggactctggagaaactgctattccctgcccagaaaaatatttttaagaatatgtgaataaaatacatmacacacacacacacacacacacacacacacacacacacaatttagtacgtaatttcagaaggctcttgtgaggattaaatgaaataatgaatataaagtgcatttagtaggtattttaaaatgttacccacgtttctattccccatgttaggagggttctttagcttctaagtttttctagaagccatagaaaaaaggttttcaggtctcttttggaaaagaaatatttaaaagtatacaactatcaagttgcatgagrtatttcactttttataagaagccatttctttcagcagttactagagtttgtttttcagaggagtgggtagcaatctgtcatcaaagtgttgacaagtgaaatctgacaaggtagaggtggtatagctgcgggccactccaaaattttccactatcttttctatttgtagataaaggatttctgttttttttttttttcatttgmgctcacttcatagcagtctttgatttctaaccttttcaaaacaataaccctgaattgacaaattattttggtatttaagcattggtttarataaragcatttcagtgttctcttgcctttattttagctatttaggagttattcctgaaattcaatttattttctcttcaaagttacgttttttcaatttattcaagtatggcataaaattatatttatagagttttaatctagaattaattatcattgttacattgctaacatttctgttttccttgtccttttattgttgtggttgaggtacatcctaaaaagaatgaagttcatatttttgaagatcagaaaagtaggtatctgtgttgagtggaggtggtgagaggtgatgatgatgatgattattatttgcttatgcaggcatacctccccccaatgcctgatataaactattgcaattattttttgaggtcatggaaaaaatgcacttcaactagatacaagtctctttgggataatggaaaattgtgtgcagcaaaatatttaaaatgagcattagcaaacaagatgtttgtattaataggaacctagaaaatgactatgcaaaggtcagcaccgatctttaaatattagtgaaatttaatttgttgcatgtaatgagtagaaagaagaggaagcagaccacaatgaagaagccattgataaattgtctaaatgtcaaaactgcttataatacggaaaatgttaaattgacaagatctatttaactaagtgaattaaaccgtttgaacaatgccctagagaaatattttccaaatttaactaaaacaaaagattttaaaagatttttgccacaattctttgatgaaagtgaagggattcctacttttctttcgaggcatagaatttgttctaacctcttttagtaagaacggtgcacagattatcttggaacatagaaatctgtcaccttttgcttcatgttgaaatagcatcatctgaccagtggttagcagctgtgaagaaccacagtctggctggggtctaaatctctttggcactttgcacagcactagcttaattgagtttaaagagctttttatgttatgcccagtttttttttttttaaatcagattctacattctcttattttcttcatatatgttagtgaaaaaaattttaaatgactaaacatgcacaaacttcataacaaaggattaatattattcatacacacatagggataaagaacttaatagaaagatgagcaaaatataggaacaggtaatttatagagggaacaaattgttttaaaaatccatgaaaagatgtttggtttcattaatgaatggaaaaatgaaacttaaaattacaagataaattttcacctaccaggttggcaacaacttaaaacttggataatgctgcatgctgttgaggatataggaaaaagtacagtcatgttttgggtggaaatgtaaatttaccaatcattttggaggctaatttggcaatacctatcaaaatgtaaagtgtgtatgtatattttcatggttatattatttgtaaggtaaaaattagaaacagatggttatttattaagagaatggataagtcaattatggtcactattcaattgaacatattgtggctattaaaacatcaggtagatctatctgtttatgctaacagagtatccatgatgtggtgttcagtgaacaaagcaagttgtatatatagtaaaattttatctttataaaaacacaaaatgaacaagtcagtatgggtgtgcacgtgttgtaagtacatttagaaagtctggaaggccgcatgccacactgtgcaatggcttccttcagagtgaggagggcagcttggaggagaacacattaatttttacatcaaatacttctgtatgtttgcattttttaaaaaacaataagtatgtgttgcttttgtaattttaaaacctgagaagaaacaaaagaccagtcaggcacggtggctcacacctggaatcccagcactttgggaagctgaggccagtggattacctgaggtcaggagttcgagaccagcctggccaacatggtgaaatgctgtctctattaaaaatacaaaattaaccttatgtggtggctcacgcctgtaatcccagatacttgggagactgaggcaggagaattgcctgaatccrggadgtggaagttgcagtgagctgagatcgcgccgctgcactcccgcctggctgacaagagtgaaactccatctccaaaaaagaaagaaacaaacaaaggaccagacagaggcctaatgcatttaaaagttttttgtttttttgaaacttggtcttgctctgtcatctaggctggagtgcagtggcaggaccatagctcattgcactctccaactcctggtcttgagccatcctcctctgtcagcctcctgagtagctaggagtacaggcaggtgccaccacacctgcctaatttttatttattttttgtagagacagggtctgactatgttgcccaggctgatcttgaactcctgacttagagcaatccttctacctcggcctcctaaagtccttggattatagatgtaagcctctgcacctggctttctctcttcattttttgcacacttttaggttctaaagcttgttttaaaaatagggacttagatagtattttgaacataatgctttgtgctttttgcattttgcttctatttagttgcttagtgtttttggtaaatctgaaattttataattaaaaatactacctttggtatttattgaatacttgcagtgggtgctcattttcaaataaatatgtcctgaatacttacatttaatatttaggttgaaaaagtgtcctaggcttctgaactgatttagaactttatatgccatgagatgacagttgtaaaatagatctagatacacattcaataataaatttaatattaacattagaagctaaatgtcactaagggagctagaacatttatttgataactgctatttgcctaaacttaaaggataacatttttagtattatagacaattagttatgtaatactcactaataatgctcagcacttttaatcttcaaagcattatacacactagttaatccttacaacaccgttacaaatgtaggtcaatatcattatccctgtttttgcaggtggggaaattgaggcagaggttaaatgatttggagtaagtttgtcatagcaggattagaatgaaggcatttttggcttacagcccagcattcagaacagtagaaccacacctttagcagacttaacctctatgtacttgataaaacattacttctcattaaatcatattgaggtcatctctgcattaaaattcagaaccaacaagtttgatcactgtataaccactttmcacacacacacacacacacacacacacmcmcacacacccccacaccattttctctttcaaggctttcttgacactatattatcttagtctgtcttttaaattgactctttattggagaattaccagactatctatctttgactttatttttcttctgtgatcttactcaatggctttactctctatttagaaaattccaaagtagtttttatgtagtccaggcctctcttctgtatttctagctaccagctagacatatctacccagagcatttccttgtacctttatctcccactgagtctaaaattcaacttattaacaaaacttgctcttcttctagactaacctgtttctatgtgtgtttcaatccaagtcctgcccttgaaactaggatcaactaggtgggaacaagtctgggtaaggggttcctgggaacttgatgtggccaagaagaacagtattcatgggtcctttgacaggatgaagaagttgaatcacagtttaagaagaagagccagagttacaaactgaggggcaaggcagaagtaaaacaggagaccacgtagccaggttagtagctaggaacattgatgtgtgtgggttcagtagttgaggcagtcattgtgaacagatggaatgcactggtacccatttactgggcacatgatgatgcaggcatgcctgttcagtgacrgcatggtcaaggcaagggtcactatatgagcagtaaccagatccccatccattgatggtcactccagattcttctctcttactcccttacactgtctcttacaaatcatcagtgcccatatgctgtcgattctttctttamaagatcacttacatccctttcttttgttatattccagctgccaccaccccaattcaggtccttgttactgaatattagtgttgtctgttcctttaatacctttctaacaggtcactcatatcaaactttccttcactcctccaatattttacccaccagttaatcttccaacaataattctgatctattaattattctttttaaaaataccttcccagatcagaaacttcattgttcctaattagctacctagcaaatacaaagtcctaattcctgagcttggcaaagacttccttattatggctctgatttatctcttctacctgtgcatcaaaccagattgcttattattcctcaaataagccttgcatctttctaatttattcttttgggtattgttccctcctttttatctatttccctctagcaaaatctgacaatcctcaaatgccctttgaacccccctagcccattgtgtatgttaccatattagcacttactacacacttcgtattgtttttgtgattattttatctgctaccctgattatatggtgtttgatagtagaggcccattctataaaactttgtatctatgactcagtaaacatatacataaagtgctcaaattgtgatatttaattggtatttagatctcataaggccctgtgaggtacaaatgagccattgtttctagtactccattctttgggtacaataggttagtccaagcttgaggtctccttatttaccttaggttctttgcagtcttctgctcatatacctccatgttaaatgtcttatggatgccatgctatcatttatccttattataactacagcaatgtcttctatttcttaattctttctttgctatcatgtttcacatttgggttttctttgccctcaagcttcctgtccttcccatggctaccaaaatagctgacttaagaaaccggggaactgcatagcatactttacccgggcagagtacaggtattttgcagatttattcagtggcaagtaatctctacttctaaaacatttatttttcaaaaggagattatcaacagtatagtagtgaaactatttctattttgcatgttactttctcaaaatttagtctatatggtaaaattattcttaagacaaataaatattaatttactctagtgtaacccaaattggagtgaaggtattaaaaattgaaattttttaaggatgtaagtataaagtgaaaaggggctttctagaattcttacatctctgtcctcaaaatttgggcaatcatagattgtcccctgtataaaaaagagcagtcattctaaatgtatgtgaagctcaatttaaatcatgctgtttattgtctcatgtaggaagcttggattcaaaatggccttctgagactgtcatcaatgccttatgtaattaaagaggaaattgtaaaagttagaaaggtgtttaaaaataaatgaagttacattatgggtgattttttgtttgggtttttcattctactattttcatttggataattctttttctgattcaatatttaatagttggacaacttgctatatattttattctttcattctttcattaatttctcccagtacagctacttttattacagttctatgccatgtgcattgggttatattgctcagggaaatgtacaagggcactgagtggggcagcattgctcagcttactttggtagatgccccctgactatttcactacctttttaatccctgcccgcacccccttctgaaaatgcagaatccagcattcttctgacattcttttcttctctccttcaaaacaactatttatgcatgaatacaatatttgaataatacaagctcagtcttgactacttcctccaggcgtatttttcaaaccaggaaattaccagcattctttttaactggtggcacacttgagtaagattcaagatgtttagagctctttaaaaaacttgtgtctttcaraaaacctgcatgacatataatgcttgaagactaaaaaggatgttgatttggtcctctcccaccttgcccatctagttattattaaagatttttacaaacttgttttatttactccattgattttctttagttttacctggttttcttggcagatagttgaagttaaggaaaaaagaaggatgaataacccacatttgactatcttcctcccgctcccctgttaatgcatgaccacttgcaaagccccctccttaatcacacagatcttggggaatccacaagagttttgacattttgttcacaaaccagtccagttatctactaatggacattggccattttcttctcattgatgtacccaatacttgctaattattgctgctgtttcttcagatgatacagggcactccttgaccacccatgtctgcttttgctggatacagattctgctttgtctgtataccaccacattcaccattcctgcttactttctgctgcacaccacttcctgcagccacttctccattcttttttttttttttttttttttttgagatggagtctcactctgtcacctaggctggagtgcagtggcatgatcttgactcactgcaaccttcgcctcctgggttccagagattctcctgcctcagcttcccaagtagctgggattacaggtgcattccaccatgcccagctaatttttgtatttttagtagagatggggttttgccatgaaggccaggctggtctygaactcttggtctcaagtgatccgcctgcctcagcctcccaaagtgctgggattacaggtgtgagccactgcgcctggcctgcttccccatccttatatgatagattccctgtggggccacaaaagggtcatttttaaagtaggagaagaatgtctctctccttcttttgtcctgtgctttttaatgggaaactagagcagtgttgtttgtacatcagagcattttgagaaataccttgtacatttttctcagtcctcccaccaccattggtcctagatatggatcgtttggtgctgagctggaagacaagtccaggtcatagactctatactgtactatgctcaggatttcccatgttcaaatgtagagaattaatggtttgactcttggctttgaagctcttcacagatctcattttgcttattctccttgaaacactgtaatttttgattaatttaggactttcaaacttagtgaagatatggggagtggacctatcagtttttcaagtaaaaggtgtttttctgcctcgtagaaatagtcagtgtagactatagtggaaactacactacactctccagttctgttatcaggaggaagttttgacaaattattactaaattgacttaaactgaaatacagaatttcaagtgttgtcttcttttgatatgtaagtaaaggtgcagtcttttggtttcatctataaaattttatctgtatttaatttacataagacatttttatatagcaacaaacagctaaacttcagccttgtcttatgcagattgtcataaattagtattactggtatctgaataaaaactaaattgaagaatatgatttttatttttctagtatagtctagaagttggtgacttttgatgctcaatgtcagaggaagtatacacctgttttaccatctcttttctttcttacttgcaatggaatattaaccaatttgcatgtcctaattcaaataccttctcttgtgtagtaacttctccacttctggatgtttttccttcataaacctcctgttgtgcttagtacttatttatttcatactgtgagattaccatataaggtcagagatcatatttattattttatttttttccatacaaatttgcgtagtgatggatatactgagtaatagcaagcagcaactgcagtgttaaggtaattgagtaagtgtaccttgaaagcagtcctgatgtaggtactttattatacccattttatagctggggactcttagaaatagagaagttaggtaattagtccaagttagctactaagctgagaaattagaaaagaggcaggcagattctagaatgcacacattaagctaaatagatgcaaaataaatatttaattcactaactgatattttaaaacaaacattccagtcctcacatttccatatgaaaagtctgcagtttacttattctaatacagtaagtattttagttaagaaaaaaacttaactgtaagatgacaattctaaaataagcctcataaaactaactgaaagcaattccaaagaacactgcattggaaacattttgagtaatagtaggcttactagagtcacttccaaagtgataatactgaaagataatactcagttgaactgaaaaattagtaactagtttaatatccctttttctctactgcttgctgataatgaactgcattctttctcttagtaatgcattccactagctttccaacttcatacctgtatacaatggcagccagcatctaggcacagcagggcagatctggggattgaggggttccttatttcatctcttagctttaaaggcatttaatgcacggaagaaagtaaattcagatcaacccaaaatttactattgtagcctgtttcctccttaccctttcctacttcacctatcactatccmctgtgcactttaatctactgtcatacttgggtcatgccatctttttttttttttttttttttgagacggagtctcgctctgtcgcccaggctggagtgcagtggcgcgatctcggctcactgcaagctccgcctcccgcgttcacgccattctcctgcctcagcctcccgagtaggtgggactacaggcgcccgccaccacgcccggctaattttttgtatttttagtagagacgaggtttcaccgtgttagccaggatggtctcgatctcctgaccttgtgatccccccgcctcggcctcccaaagtactgggattacaggcatgagccaccgcgcctggccgggtcatgccatctttttactcaaacatctgtatatactccctcccacaactctgcctaccccaatacggtagagtactgtggttgcaaacagactccggagctagtctgtgtagatccaaagcctgcctccaccacctgctagctatgtgaccactctgtgcctaagtttcctcattacaggaatgctgatggtattacctcaaagagtagctatgaggattaagagagttaatacatgtaaaatgtttggaacaagtaagtgttatctgttgttatcaccatcattttcttcctcatctttttctccatcatcatcatcatcgtcatcatcattgtcgtcgtcgtcgtcgtcgtcgtcatcatcatcatcatcatcatctggtgaaatcttatccttctttgaggacccactaacgtttcacaacttgtctgagctttctcacagcccagctgttcaggcaggattgggcccctcttgtgtgctgccacatttttcactctgccatttcagtccgtagcatactatatctcattagttcaacatgcatctgtttcttgattgtaagtgcattgaggtcaaataaatgtaaggatgaagggcgggccgaggaagtttgtactatgtctgaaattattttagattatcacccatatggatactatgggaaatatttttagtcactcctaatgttaaagaagctgaaggatttttcctccattaaaatatgtcttaaaatatttttcaaactttgtcattcggaagtttactggaaagaacatttctttcctgattctataaagaaaatgtccatagtttaaattattgtatatatttctaatatgtagtataacataaatacagtatagtactatatttatttccaagcaaacatttgaaaattatataaattcctttcaaacttttgtaaaatgttgaccttttttctaatgcagactagccttctcccaatcagtctaaatcgatgaggtagtacttgattaaaaaaaaaaagtattcatagtgtccatccctagcccctgctagggggaagacaggatgtatattattaccattttgttttttcaaaaaaaaaaaccccatagaataaaatatctggatccatcatgacatgcagattaacatactaagttgaatgctaatgtggtttcagagtttacttttaagtaattatgtttcttataatagtataatagtaactatataccatttaccttgcaaattccactttaattagcctgtttgtatgtaggatattgtaaatatttgctttatataccaaaaatgcaccacaaaatgtgctcgtacttaataactaccaacagatgtttcctttccttaaaataaaacttaaaaaaatgcttaaatactaaataattctaaatatactcagagccttaaccaaacatatgctattgaaaacccaaatactatatatattcttcttaccacatttctcaatgtgatgacatactaaatccaggaaaagaagtgtatttttcctctttctagagtttatttctggatggttaaccaaggatacactagagyatgtttattctaatgggccatatttcaaataacagttgtggcgaatgattctttttactatttctaaggtatcttggttttattggcaatagaagataattaattggcacctctttttaattattttttaaacaggatagagattccttctgccatcagatgtctttctgcttgactgaactgcacctgtggtctttgaagaataccttacacattgcgggtaaatgagctctggattaatttcaatatttttcaaatatgttacaccattataaataagtactagcaaaggttagagcctgaattctccagctggagttgcattctttctttattcttaatgaaaaattggttaatggaaaataattccttttaattactcttactaacaatatttacagcttgagttaggttttcagttttgaaaattaatcttattggcttaatatttgttctctcttaagatacacacgagcctaggaggttgacgctgcagtgagccaagatcgtgtcactatgctctagcccaggtgacagagcgagaccctgcctctaaaataataaataaataataaaatttattgaatggtaaaaaaaaaagatacatattcaattttttttctgggattcttcataataagatttatattcataaatatttacaggatagctaatggtaaaggcatttctatttgatattaaaataacatttcaaacatataggtaagatgtacgattattttcatgttctttgtttttcacaattttggggggggagaataatatgtgtgttttaacaatgcttattaacatacgatacagtgtactttataagaaatatctttaaaaaatctttatacgaagtaacacttgtatttaggagaagaatattatttatatcttttaagcatcattactaagaaaatgatttaccttacaaagtattgtttcttcatattaaatatagaattaaggaygactttgatattttcatcgtttatctgctttaaaatgtataaagattgaaatttcagttaaagtagatttaacatttgtttgctccctcctaaaactcttctaagatgccaataaaggaataaaaataaagaaggtataaaccctttcgacagaggggacaactgaaattggacaaattttggaagatgggagggaaagaggaattagcagagatgaaaaacctgaatataaattgcctgcagaggagagttccaatgacagccaatttatgactcaaaattctggaaagatacagaaatttgaggagccagatattgtagaagatggtatgtgtcatcagagtgacagtaaagggacatgaaagtttgcagaaaaagttgtgagatacctttcatgctgtggaaatatttaattaaggaggctctaaagttgggaacaccaggggcagtagaagacgacctgctgaactgaaaacaggcacgaaatggaaggwagcctacatactgatgggtgaggtcttcttaatcccacttggttctgagaatgtcatacctatttgtacactttccaagaaagaaggagcttgagatattcctctctggaatgactgcaagacccgagaaagaagacctagtatatagacgtttgagggagtcctttggtgaaataccccagtccttggctgatcagtgaagcccaccagttggcaagctctatgtgtgtacacagggcttccaatcagttttttagtgcctcacttgtaaatacaaacagagaactaaggatcactagatatttgaggaatatcttcaacaggaaagaaaacaaaatgaataggtgaatgggtctctgaagaaacagagataatgtaggaagsggggaaaaaagtacaacagagacctaaggaaaaatactaaatccatgaagcaagaaacaaaaacagaagcttcagaaaacatttgaagttatacaggtctcttggaaattaaaaatatgttgcagaaaaaattcaaaattcaaaagtgtaaaagaaatctcagaaaatagaaaaaagaaatcccaaagtgaacttattttactgctggtcaaaatttttaattgaaatgttttcttctttaatcataattgcccatttttcatattattcccttattctcatataactaggttttatgcttctttgagatggtcaaccttttaatcacttgacattctcctagtccattgggtcttcttcacttatcttcctacccagcttggaccccatggttggaagtctgagctattccatcttgatccccttttaccccttgtcctctgttcatgcccagcaaattccttccctgtccctccatgtgtcctcaagttttctgtccctgttccttctattctgagtcagtgaatggtttttagagaagaatcacacagtggtgcacagtagccccatgagaatagtcttcaaccccaactgcatttttgcagggcctacccattctctctattgggacattcttctatttaaccttttatgaatcctacttctttagggctcggctttattaagtcacttagagaagcctttcctgctatctagactaaattagtaaccctgttaatgtgctctcattatgcttgatgtttattttttaaatgtttgaaataatcacaaacttatagaaaaattgtcagtacagagaattttttttcttgaaccgtttgagagttgtagcctgatgctttatcacctccaaatacattcatgtatatgtcctacaaaaaggattttgtcctgcattactgtataagccattgaaatcaggaaattaacaatgatgtacttcagtctaaatggaccagtttaccaattgtcccatcattgttctttttttaggaaaaggatttttgttcacagtaacatattgcattgttatgtttctttagtgtccttcattctgggttattcttcatcctccgcctttttttttttttttacattttcatgaccttaatatttttgaagatattaggtgagttattgtgtaggatgattgtaaatttggttatatttgaaatttcctcacaattagattcaggttatgcatttcaatgcatcctatcaggtggtgcataatttcaatttgtccctttcctgatgatattcatgattacctgataagatagtgtctgctcggcttctccactgcaaagttactttcttctttgtgattagtaagtatttcatagggaaataccttgaaattatgtaaatatcctgttcctcatgctttaaatatattattatatatgatcaatttattttatctctgtggactcaagttttccactttatggagttgttatagtcatatcattattttatttcattatgtattttgatgtttaaattgtccctgatgtggccagagggaccctcttcaagctggcttctgtgtctttttgacatgtccctgtcaaaatctgagcactttaattctttctggtacaacaaatgttccagactcatgttgtaatttcctttccctagcctaggaatcagtcactcttctaaggagctttgttccttttagagggcaagggttctagaagccaagttctgctttaggtgcactcattattggaacattgctgctcccaggccctctcagtggacagagcttgcagaatgtatgtatctatgtatacacacatatttacatccatatttatttctgtatctatctctctatattgaaaccatgagtttacattggtacatctcattcctatctaccaccatagggttcattctaattttctccctttccatatttgtatttttcttctcagacagtgggaaacctggagctcccctattttttatttattgacttatcagtcaccctgtttgcagtcaatcccctatctctgtggctactccttccctgtatagatacccttctcacccyatgtgggatttgatataccatgttgggttgcccccatatgyaaatgtcctccttaccttgtttagcctctaataccctacaccaggctgttgcttcatgtgagtgttcttaccctgctggagttctaacacaccatgtcaggctgactctctgaatggacaccttccccatccagctctggtacccactgtagggcaggttttcttaactggatgctctccttattctgcttgtgttttgacagtttccactctgggccagatgcagtaggtcagacttgtgcacataattcaggattctttatgatcttcatagttctattctagagttatgatatatatttggatgtatggaatgatgagtataattatagggtggaatattttaatggagatattgtctgcatatgtagtgcctgtggttcttagattttttaaaaaagcctttttattgaagtataatatatgtactgaaaagtgtaaagatcataagattatgttgtgaaccatcagaatatgaaaacacccataaaatcaccatccaggacaacaaataaaatatcagtatccaagaagtcctactcatgatttttcgcaataaatccttattagatatattcagtctaaccagtagacataaactgcattctttaaaattgtatgcctctactaatggcatgatgaataaaatagagctttaacaagtacacgcaattgactattttgaaagactatatttgaaaagttaattatagcagtaatacttttttttgaagttttatcattcagtttgagaaagtctggagcagtcagtcactagggggcagcctgtactgcttccacctctttagaaacagttgtatactctttatccttatgttagtaactgagaattattttgcattgaagaaaacaaatgttccttcaatgaaagaaatattttattattcatagatatgaagaaaatggacaaaattattttgttctcttatatttaaactggaataattccttggttaaatgaatcttgacatctgggaagcccagctttgcttcttaggtagccccagcaaagtgtccgaatttaggtttagaaggggttttccctgtctaaacaagtttcagataataatgtatccaaacgttcctctaatcttccctttctcgtctgtggatttctcccaaatgccgtagaataggaactagactcttgagctaaattggagaaaagaaaaccacagctcagaatccaacagggcattttcttccatccactgatttcatctggcattgcttagtggcagttccttttggtagaaccctgtgaaaaatatcagaggatgtgtgaaagagaaaacttggtgtttcttgatttcagttctttactaatctttttctcatgccattctagttttgtgtaaatcttttctcattagattgataaactttccagtttctgcatatccctagaatagacgaactcatctccggatgcttttgagccattttatttctagtagcataaggagactgtttctgcttttctccctatccttcccctaatatagtatggcttggcttcttattctctgggacttttaaatcataatttaatgttatttcttcctttctatagatagagacattgggatctaccagtattatgacaagaaagatccaccaggtaaagtacctattctgtgcaattaatttttattaactaaatattctaaaccatgaaatactgaccattaaaagctctcttctcatgagctttagataaattctagaattttaagaaaagtcccttcagttctttagaaaaatgctgaggttgatatctatctgttctatataaaataaagtagtatcgagaaaatgctgtagaaagacatgaaaattttcattttactgctgatcaggctgattatagggcagtctattcacatttatttatcagtgtcccagtagagggcattgttaatgcatgggtcctactgatgctggcctcctggatcctcacctgatatctgaaataggcatttctgagtgaatgatcaattttctttatctgattaatcctgctaatcccagaagttttatgatgggccaaaaggtctttctagctagagttacttcctgttttggtctccgttgaagtgggcttgtgtgagcagcctgtgtgcttagcttagtggttaataggctgacttcatggttctgatgacagactgaagcagcttctgttctgggctctgttgcagttctctttcctatctgatcagattggaagctcaggatattggtccaccttttgtgccctttcactgcaaatttaggaaatatctctatgaaatgaaaacatccaaattatggcatttttttcaactgtccttttagaacctaagcataatttattaatctcaataatgcatgtaatgttaataataccttatacatgtacatattaaaatacaaggcattataataaaaataaattctacttttgtttttttctttctatcccttctgccacaatatcagcgacagagcatggtaacttagaaaagaagcagaagctggcagagtgtaagcttactttatattttttggaattattataaaactgtaaagttcagtattataaaatattcatctggaacaaagaggaaactttattccctccaaattttttaaattcctattacttaggaatataaacatataagtaacaattgtatttgtcaggcctttctaatttagatcgttgaaatctctattcaattttgataaaatgtttgtttatataaacataaaatttcataatgaactatatattagtatatttaggataattataccaagcttaaattctgatagtaacatttaattattcatactttgcctaaattgttaacatgtcttacccatttttaagaaaatagtatttgtaatatcagtattagcattttattcactctagtcttttctgatctccagtatataagtatgttgtatatattatggcgacaatgtaatacggttttaatgacatagaattaaacatacattaaaatttttttggattatagctagagctgaaaatcccatttgttctcttgttttttaaatggttgaactgacatttaattttaaaaaataatgtattagtagctgcaacacagatttaaaaatttgcatatacgttctacatcaaaattgtttatagacccaaattcatttgctgaaataagatgtatagcaattctactcttaaatttaagtatctatgtatactatgtatatgtatatgtacatataacacacatgtaagcacaaatacacatataactcatttagaattattaatgaggagaatccaaagatgaattcatttttctgataaaatagacatgtttaacatttttaaattattttaaacagaactatttttaatttattttaggctaacatgactctactaaataattttatccttcacttaatttatttaaagcaaaacgaaggcttatcattattcaattgtggtgtatactttaaagataactgttttaaattaaaaagagcactattagggcctaatttgttaaaacttggatttccctcagatttttccatagttttaaaatgtggagctttaatgcttaacttcatatatttttacatacagttttattttttatttcttttcattttatttctttgctcattatattcatttactcatgataatttttttttttttttaggtctgagtaggttacttgtagaatttggaatttcttttggattgaacatttaattatttacatgaaaaagttagtaaagactacatcatttaccatgaattactagattcacaagcctagcaaactttcccagggattctccaagccttgttggttgtcattgtaaaattatggttagggagattgttttgtggtaaaaatcctgttcctatgacaaagcctttcataaggctgtcatttgatgatggaaatgaagcccacttcctctcgattatagaggtgttttattttaatctccctaaggcacactgctaagcagaatttcctttttaaatcttgtttaactaactgtagtacatgttttatttgccagcacgagattatccttggacgctcaaaaacagacgcccagaaaaactccgagactcgctcaaagagttggaggtatctttcaaaaagtttcaaaaatggcaacaaacaaatctgtttttaaaacatctttcaacagctttaattttcataaaggatcaactctcatggtgatgatagctttgcttttgtccagtgatgagttccaaaacagttggatctttgtgtggcatgttgatctttttttgcttgcaaatcagaggcactttaactgataatgacaatgtgtacagccaactacgctctctctttttctgttgtgcttcaggagctgatgcaaaacagtcggtgtgtgctgagcaaatggaagaacaaatatgtctgtcaggtaaaatgatttgacaagcctttgcagtgtttaaccaayggagctgaaaactatgtagtaattggtattcttgtgttatgttaggtaatggacaaaaacttttttagcagtggttatttcatagtttgaattctagttgttctagagctaacattagacagattgacacaggccaccaggctcattaatcagtattaaccagtatagttgtactgacatacaaacactaataaaaatcttttcatattgtatttttttgtttgaagttgtctgaatgttgtagtagatgtttgctggcatagatttaataatatttttgagtgaagatgaaaccacagggcaaaagactttttggcatactactcttgtaagcatttgtgaatatcattgcttatgcaaatcaacaagccgactacatacagttagacctatcataacaagacatttagtcttactttttgaaccctgtaagctgtgctgtttactatggtagccactagtcatatgtgactgaataattaaataaaataaaaaattcagttcttcagttgcactacccgcatttaagtgttcaatagccacatgttatcatattggacagtgcagatacagaacatttccatctcagacagttctattggacaatagtgttaaggcctagacaagtgatctaagtattgaatgggtagattcagaacataataattagtgtacactgattacaagataatgacaaatgctttagctttgctgataggcttaaaaagtactatatgcctagaaaaatttaatatacttgtgataaaaagaataattattagtcatctgtggaattgaagttgcattagttctaataataattgtaactgatgtatggaatcaaatattcctatattaatttaaattcttttttacaatgtgatttattttgtgtaatcattcttgtttgtagtttaggcccatggttctattcataaagctacaacgtcaaatttgtagcaattataaacagatcttaatctactatttgaatatatatactatcatttttgtggatgctagtttttcctcatttttttgtctagtctacctttactcatggaggcaactatttagttaccttctcaactggcataaacttttatttttcagaggtcgtttacaagggtgaattagcattttgagaattataatacttcttaaatttgccttaggatactattaaaaaggatggcatttaaaaaaattatagcttatttgcataatagtacatttcaatcagactttaaaacttgaatacaaaatacgctccagaaagtttcaaacttagtaccaaacttgtagtttttaatgccattactcacgttaaaaacaggctcagaattatttgaccagagggccagcctgccacctatagtaagaggcatgtctcatggcctccacccttacccatcacacagggtaaattggaacatgtcgggcatcttaaaatatgcagtggagcatcccaaaagacaatcctttttagatagagtttaatgaattttaatttaatagtaattttgtgtgtgtgtctgacgaagggatgtctggagaagaatgtccctcactattacattaattcaactcagaaagggaattttcatgataaaatatatatataattacttttgtaatttacagtaatctaatcggttaatcaggctggtgtaccaatgaatctgcttttaacgtttctaataggacttatctttttttgttgttctgttatattctgtgcttcatttctatgattataaagatatttctaaaatagaccttatactctcagcacattcttgatgtggtatattttaacaagataacttcacctccaccctgcccacaggtctaggttagtcttcacatatttaaagtctttgagagacctcctaacattatcccttcacttcttcagtttctagttaagactgttagctagttcttctaaaaatctatgtaggttctatttcaaaagatctctggtatcgcaataaattaaaattttgatgttcaagctacgttattagcttaagggaatgaaccccttagcccttttagttaaatttttgttaaattttccttagttataaagtaagtaaaccacctcaacaggctccccaagggacctccttttgtgcacatatccagtatggtggttccagagataacatgtcagctgactgcaacataatgctctataactcttagaaaaggagtgaaaaagttcatcaacatcttcatgctaacatgtttggacgctcagtcttttaatttggctactcctctgctaatgtacgtcattttctcccaagaaatggtaaatttaggatttatgaatttattttagttgtcatcccttactgctttaaaaagtccaattgtttaaaaatgagccaggcaaccacagcaacataagatttcagaggatgcaatctgaggttggatctttctctgtgtcaaacagtgagttttcatcatttaccaaagcttagttgatgttgtcaatccaatgatctgcacattgtaccatttaaaaactaattcccgtcacctgtaaattcagaattattttctttctttttttttggaggatagtagtttattttatttttcaggatgtttacttattttttctcctgtttttattttttaattttatttttgttttttatttccataggtttttgggggaacaggtggtgtttggttacatgaataagttctttggtggtgatttctgagattttggtgcacccatcacccgagcagtattcactgtatcctatttgtagtcttttatccctcacccccctcccaccctttcctgtgagtccccaaagtccattgtatcattcttatgcctttgcatcctcacatcaaactcccacttataagtgagaatatacagtgtctggttttccattcctgagttacttcacttagaataatggtctgcaattccatctaaattgctgtgaatgccattatttcattgctttttatggctgagtagtattccatggtatatatttaccacagtttctttattcacttgttgattgatgggcatttgggctggttccatatttttgcaattgcgaattgtgctgctgcaaacatgcatgggcaagtatctttttcgtataatgacttcttttcatctcggtagatacccagtagtgggattgctggatcaaatgatagttccacttttagttctttaaggaatctccacactgttttccatagtagttatactagtttacattttcaccagcagtgtaaaagtgtttccttttcaccacatccccactaaatctattattatttttattttttgattatggccattcttgcaggagtaaggtggtatatcacattgtggttttgatttgcatttccctgatcattagtgatattgagcgtttttccatgtgtttgctggccatttgtatatcttcttttgaaaattgtccattcatgtccttaacccactttttttatgggattgtttgttttttttcttactgatttgtttgagttcattgtagattctggatattagtcctttgtcagatgtatagattgtgaagattttttcccactttgtgggttgtctgtttactctgctgactgttccttttgctgtgcaaaagctctttagtttaattaggtcccagctatttatctttgttgttattgcatttgcttttgggttcttggtcatgaaatccttgcctaagccaatgtctagaggggttcttccaatgttatcttctagaatttttatagtttcaggtcttaggtgtaagtccttaatccatcttaagttgatttttgtataaggtgagagatgagaatccagtttcattcttctacatgtggcttgccaattatcccagcaccatttgttgaatagggtgtcctttccccactgtatgtttttgtttgctttgtcagagatcagttggctgtaagtatttgggtttatttctgggttctctattctgttccattggtctatgtgcctatttttataccagcactacgctgttttggtaactatggctttgtattatagttcgaagtcaggaaatgtgatgcctccagatttgttctttttgtttagtcttgctttggctatgcgggcccttttttggttccatatgaattttaggattgttttttctagttctgtgaagaatggtggtggtatttgatgggaattacattgaatttgtagactgcttttggcagtatggccattttcatgatattgattctacccatccatgagcatgggatgtatttccatttgtttgtgtgatctgtgatttctttcagcagggttttgtagttttccttgtagagatctctcacttccttggttaggtatatatctaaatattttttttcttttgcagctattgtaaaagggttgagttcttgattttattctcagcttggtagctgttgggctactgataatagcagagctactgattgtatacattaattttgtatcctgaagctttactgaattagtttatcagttctaggagccttttggaggagtctttagggttttcaaggtaaacgattgtatcatcagcaaacagtgacaccttgacttcctctttacccatttggatgcccttgatttgttgctcttgtctgattgctctggctgagacttccagtactattttgaatagaagtgttgagagtcagcatccttgtcttgttccagctctggctgggacttccagtactatgttgaatagaagtgttgagggtcagcatccttgtcttgttccacttctcaggggaaatgctttcaacctttccccattcagtattatgttggctgtgggtttgtcatagatggcttttattacattaaggtatgtcccttctatgccagttttgctgagggttttgtcgaatgctttttctgcatctattgagatgatcatgtgatttttgtttttaattctgtttatgcagtgtatcacatttattgaattgagtatgttaaattatccttgcatccctggtatgaaacccacttgctcatggtggattatcttgtgatgtgttgttgaattcagttagctagtattttgttaaggatttttgcatctatattcatcaggaatattggtctgtagtgttcttttttttgttatgtcctttcctggttttggtattagggtgatactggcttcatagaatgatttagggaggatttcctttttatcttgtggaatagtgtcaataggattgataccaattcttctttgaatatctgatagaattcagctgtgaatttgtctggtcctggacttttttttgttggcagttttttatattaccatttcagtcttgctgcctgttactggtctgttcagagtttctatttcttcctggtttaatctaggaaggttgtatatttccaggaatttatccgtctcttctaggttttctagtttatgggcataaaggtgttcatagtagccttgaatgattttttttttttgtatttctgtggtattggttgtaatatctcccgttttgaacttattttgatcatctctcttcttttcttggttaatcttgctaatggtctatcaattttatttatcttttcaaagaaaccggctttttgttgcatttatcgtgtgtgtttttgttgttgttgttgtttgtttgtttcagtttcatgtagttctgctctgatctttgttatttcttttcttctgctgggtctgggtttggtttgttcttgtttctctagttccttgaggtgtgacctgagatggtttgtgctctttcagacattttgatgtacgcatttaaggctatgaactttcctcttagcaccatctttgctgtatcgcagaggttttgataggctgagtcactattatggttcagttcaaagaatttttaaatttccatcttgatttcattgttgacccaacaatctttgaggagcaggttatttaatttccatgtatttgcatggttttgagggttccttttggagttttattctactgtggtctgagagagtacttgatataatttcagttttcttaaatttactgagacttgttttgtggcctattctatggtccatcttggagaaagttccatatgctgatgaatagaatgtatattctgcagttgttggatggaatgttttgtaaatatctgttaaatccattttttttctagggtatagcttaaatccactgtttcttttttgacttggtcttgatgacctgtctagtgctgtcagtggagtattgaagtcccttgctaatactgtgttgctgtctatctaatttcttaggtcgaatagtgattgttttataaatttggggcctccattgttaggtgcatatatgtttaggattgtgatatttttcctgttggacaagtcattttatcattatataatgtcactctttgtctcttctgtgctgtgtctgcactcccaattcaccccctcccttgagttctgtccagcaaacttcacattcacatttggttgaaattgttacaaagttgagctggaagtttccttctccctgtggtctcttcccagggagcccttcccaaggatctctgcaagacaaaagtcagaaatggcttccctggggactgagagcccatagttctcttcccactgctgcttctacccttttgttttgcttggctctctaaaattgtctcagctccaggtaaggtgagatccttctcctgtgatctagacctttaggttccctatttagggtgtgtgttcgggggtggatgatcctcctttcccactttcacacttcgggcactcacggttttggggctgtttcccagggcctgcaggagcaatctacttccttcagagggtctgtggattcttttggcttttctgttaagttcctgtggtagttcttggagcaaaagttcatgatgtgtgtccccacgtgctgctctgtgtgtctgagtgggagctttagtttagtcctgcctcctatccaccattttccttctacctcccagaatggttttcaaatcaagacttacctatacatatgttgaggataaaaattgtcttttaaagttgattttcttcagacaatgcctgtccctagtttgggatacattaaaaggtatgagatatatagttttagttttaccagctatttaatatatttctcacattttttttgtctcctaaaatcatttcactaaaagtgtttaataatttcttgctttgaatttcttaaatcattataaatctgttcctagagaataatagttttaacattaatatactattaaattgttcattagtctggtggaatttttgaatttaataaagtattatggtttaagtcacattcatgtttgtagattattatgcaattagtttaaaacagtattatcattaagtatagatgtaacttcatatatgttcattttggattaaattatttgaattgtgcatgtaaatttaactataaaagtatataatatagtcagctgtaccatggtttccatccataacaattctgcattttcaggcacaatcataaaaggtcaactaaagatagtttcctttttaaatgcctctggtaaattatttgacaggctatgtaaaagtacaaattattttccaagcctatcacagataaattgtgaccttatgaaactcatttgatcacaactcccttaattgtagaacttgatttttctttttgtcaagttgtgcgaaactcaatttgcttttctcataaaataataatagacataccatgttttcaagttataactattaataatagcttattatttatacaaaactcatcacacagtatttattgatttcaaccattgtgggaagaactgtgggagtcactaaagaaatataaggcatggactgggtccacagcataacctagtcaaggaaaatagacacatgaaatcactaggacactaatgagtgccaaattgtatgacactgagtaaaatgatggtagaagtttagagaaagcatagcataaaataagaacaaatatgtggagaatttataactttacttagacctaaaaagctgtgtgaaatttggttaagccgaaaggaaaagtattccagaaaaagggaattatattaattgagacttaaatagggtgtctacatagtattgaggaggtgagcccatttagaaatacatggttcatgttgaagaatgaagggactagaaaggcaccttggaacttcctcgtcggggactttgaatgttatattaaggaactgacacattgtcctgtaacactgtaaacactttcatattgcggagtaccatattaaaattaggcttatagaaggattagcctggcagtgggatgtagggtaacacgtgagaaccagaggccctgaaatcatttcaaatgataagtacagtgagcttaaggtgcagagggttttgaaagccagaaaaatttagaatgacaggtaaaaaatttagttttgactctgttacatgtgaagtgaccagaggtaatcaaatgatgatattattggaagtatggaaccgcagtgaaaggttggtgttgaaaatttgagaggagacagcctcccaaatcacctaagaggtgatactaaaaccatctaagagggtgccctcaagaaggagtagatgagtatcttgggagaagagctagagccaaggatcttctcatttggaggacaggagaggaaaattaagccaacagaagaaacataaagatcaattagagtaatgaggaactgtggagaagtttatttccctaaaaattagagggtttagaagtcagagggcctgaaaaagccttaacttatattttgattcctgttttaatatttaactacttacaagtctcaatgttgttattattaagctctctatcaacaggcatttgttgaggctcaacaagaaacccatctttatgttagggactagtgaaaatattagatggaaatttgaaatatatttgggaaatgaaactaatgtataaaatattaaaggataatttgatattaaatgttatatttgttgatacagtatctaaagtttaatatctaaagtacagtatcttaagttcagaggttgttgctgattaaagtagttggttaagatttcataaaggagactggacatagctggactttgcaggaaggacataactttaggcaagcagaaagagaaaggacaacattcctagtcaggggaaatgtaccatcaaagaaaaactgtcttttgataagcacaaattaagggctagaaaggtagtctgaaaagattgctccatagatgtgtatttgatttcctcttttgacatactctacaactgttttgttgcagggttgggctagtttcactattatgataaacaaataaataatactgtgtaggggctactgaacttagccagtatgtggcagcttagcactttatattttcccacttaaaaaaaaagtatttactggttttctttaaaattatgaaaataacagacatgcttaaggcagaaaatttggaaaacacagagaagcccaaagggacataaatcatctaattcagccactcagtattacccactattcaccatttgatatttatctttttactgtgcagacatttacttacaagtatttgcttaaaagattacatagttgatatacatatactgtacatatggcctaattattttaacacataatatttgaacttacattaatacattacatatattctttttcatgtgtcataaaataaacacgtgaacccaacactgaactaatgaattagattattaccaatattgttgaatctgcctattattcttcctccacccagttgcccatccctctcagatacagatggttttaaagagcttttcctaccaatcattaaaatgtacaaattaaaatagcagtgagatackactttttccactcaggagataagcaaatatttaacagcctcagatattaatggtaagtttataggaaaatgagtattttcataaatcactggtcagagtgtacaattgccaattggagggcaattctattgttagatatgtatactagagaaacattcacataaatgtccaattaaagtaaatgtttaaaattgagaaccatcttatgtctgccaattagtgcagaactttttatgtatactttgattccatttatgtaacataaattttctaatttgccatggatatgtatttatgtgtgtaaaattattaaaaaatgcactggaagacacaattctagttacctctgatatcctgtaattggatattcttcaattctgtatgtatttatttaagttctatattacctgaatatacattttttatttaaaatttatatagcatttcctatgtgccaggcaatctttgagtattttataaatattaactcattttcatttctcatagaacaaatattaactcactgtactcctcacagcccttagagatagctattatgtctccatttaatagatgataaaacaggaataaggattaattacacaactagtaagtcataccaggattcacactcaaataaggtggcttcaaagttcatgcccttagtcactgtatatcatactgtttttcagcaaaacgtaattatagaaaaaatattcaaataaaaatatcctcaatcacagtaagatatggaacacacataggtcttcccattaaacatgggtaattaaagctatattattattctcatttcctcttataacttcactaaattatagtaaagcaatgggaaaaaaaagatgtaaagtcatgaggacaaagagaataaaaaggctgtgaaaataggagatatcggtttttggaagttgcaaaccagatggctatgtggtacctgactttacagaccacaggctttcctgaaatatcagtggttgcagcaaaagataccaatggggaataaaagtttagtactatagaaccccagaaaggcacaaatattgggatgaccaagtgcattaggaggtagaacttaaaataagggggtatgttgaaagtttgtataaagagaaaatgagatggaataatttttgggagacaccaacccacagggtttctggacttgaaaacactaagcacattaaaaagtaaacatgaggtggctagactgaaaataaggtgattaattgagtctgtatccagaatagtgaggtttttcccaactctttccctgctccagcaacaaggcttatgtctctatgttacttgcttagaggatccttctctggaaaaatagattattcttcccagagtaaaacgtatacatactgatgtttgacagttctctctgaaaaggtagctgtgccaactaacctccttacaatgaggctcaagttaacaagcctacccatgtaaaccaactttctaatcacctttaaatgtaatcggagagccagagatcaccatacttttgtggaaattctccatctgtaaatctcagatctgtaagtctaaggcttcagaaaatagaatcagggacaatgccgtaaatggaactaaattcagagaattaaaatgtgtatccacagagaaataagagaagatgttgcatcctggaaacaagaatggtatgctgtttttaacaaggaataattggctgggcacggcggctcacgcctgtaatcctagcactttggggggccaaggtgggtggatcacctgaggtcaggagttccagaccagcctggccaatgtggcaaaaccctgtctctactaaaaatacaaaaattagccaggcgtggtggcacacacctgtaatcccagctactcgggaggaggcgaaggttgcagtgagccaagatcgcactactgtactccagcctgggagacagagtgagactccatatcaaaaaaataaaaaataaaaaataaaagtaataatcaggaaaaagggaaaggaattcttgcaagaacatgacagcgtaaatagaaaaattaatacatttgaaagataaagttgaaatatccctataatgtggaacagaatgacaaagggacatgataatgaaccaaaggtgataggagataaaaaaaattagaatattaagtcaaaagatgtaatatctaactaataatagaaaacagaagagaagaataaaagaaataataaaagaaaatttccccgaactgaaggcatgtctgtagtttgaaaggacccaatgattaaaaaaagattaataggcatattttgtgaattttagaaaaggcatttttgttaattttaggaaatcaaagagagaaaaaaagaaaatccaaaaaacttctagagtttaaaaaaaaagaaaagaaaaaacagcaagatacatacaaaagattgggaatcaggattatatcagacttctcaacagtaacacgaggagttagaatacaatgaggccttcaaaattcggaaagaaagtgatttttagcctataattctgtatctaaaattctaaattgtcacatgtatacatatgtaacctgcacattgtgcacatgtaccctaaaacttaaagtataataataattaaaaaaaaaattctaaattgtcattcaagccagacactttcagacttagtagctctcaaaaaaatttacctgccaagaacttttctcaggaagttattgaaagatgtgatgccctaaagccatagagtaaacaagattcttaggaatcaagaaacagtgaatttcatacaggaaagaggtgaaacaaagttttagaatgactgtgccttagtctcagagagcagctagtccaaataggggcagggaatgggaggttccaggaaggatgttgaagagatggaaagcaactgatagatcatttaatgtaagataattaataagagataataagagatatggtaaatctgcatatatggtaatgggaagtcaataagtaatgactaaatcaagaaacagcatctattgaagacactactccttgcttgtccatcatccatttttccttatgaactgactttgatgttcagagtagcaatataaccaattaaaaattcttggctttcctattccccttccagctgcagttggccatatgaagcacgtcttgctttgctaagcagaggttactggtgggacttccaagaattgggttataacttctccgcttctgctcttcgccttcttttagaagtctgaatctgagatatgatccagaaagggtaggggcagcttgtgaccattcattcactcaatgcatatttatttagtaccaacaatatgccagatagtattctatgtgctggggatagcagtgaacaaaagggacaaaagtgaccaatatccctgttctcatgtagcttatgttctaaaagaggacagagtcaagaaaagatgaataaggaaaatatgtaagagagtgcaactactagagaaaaataaaagcaagcaagaaagcatgatgggggatggtagggcaggatgggcctcatatttggtggccaggaaaggccttaatgaagtatccccagattgagattaagatatgaaggaagtgagggagtaaaccatggaagatacctgcggaagagcgttccaggtagagggaacaacaggtacaaaggccctgagatgggagtatacctggcatgtttgaagaatagcagggagttgatatgagtggggtgaaatgagcaagaagagtagtaggaattgaggtcagaaaggaaatgtgacactagttatatgtcttctaggtcatccagagggcttggcttttactctaaatgagaagagaagctcttgaagagttttgagtggagaaatatgtttcaatttactttttaattggatcactgtagctattgatgggaatagattgaagacagtgaaaaagatgagttagaaggctgttgccgtagtccagggtaaggtgtgatggtggctttgactggatgatagcagtggagtggtgagaaatggccagattctgggtatattttgagtgttgaggcatcagaatttgccgatggatcaaatgtggggtatagaggaaatttctgaggaattggaagaatggagttgtcatttactgatgtggggaagattgagaagagatatttttgagggacttatcagaagttcaattttggacatggtatgtttgaaatgcccattagatagccaattagagaagtcaaatagattgttgattattggaatttgtagttgagggaaagatttgggccagatgtataaatttgagtggcagcaacacagatggcactaaaagccaaaagactggtgaagatcaccaaaggagtgggtgtagacagagaaacagaggagactgaagagtggagccctggagtccactaacattttaagattagagagacggagaaaagggaagatgaagaaaggagacagaatggagtagctagagaagtagagcacaatgaagggagtgtggtgtcctggaaaccaagtttcaagaataaagtggagtgttactagtatgccaagatacctgtaacaagatggtggccattggccactgcatggaggagcatgcaggtcattcatgatctagataaaagcagtttcaatggaaggtgatggtagaagcctgattggaaagtattttttaaaaaacttttattttaggttcaagagtacatgtgcaggtttgttatataggtaaatatgtgtcatgggggtttgttatacagattattttgtcatcctggtactaagctgagtacccagtagtgatttcttttgctcctctcccacctcccacactccatcctcaggtaggccccagtgtctattgttcccttctttttgttcatgtgttctcatcatttagctcccacttacaagtgagaacatgtggtatttgattttatgttcctgagttagtttgctaaggataatggcctccagcgctatccatgttcctggaaagaacatggtcttagtcctttttatggctgcatagtattccatggtatacatgtaccacattttctttatccagtctaccactgatgggcatctaggttgattccatgtctttgctattgtgaatagtgctgcaatgaatatatgcatgcatgtgtctttatgatagaactatttatattcctttgggtatatcccagtaatgggattgctaggtcaaatggtatttctgactttaggactttgaggaatctccacactgctttcccccaagtggttgaactaatttacacccccaccaacagtgtataagcattccttttctctgcaacctcaccagcatctgttatgttttgactttttagtaatagccattctgactggtgtgggatgatatctcattgtggttttgatttacatttctctaatgctcagcgatattgagctttttctcatagagttgtcggctgcatgtatgtcttttttttttgaaaagtgtcagttcatgtcctttgcccactttttaatgggcttttttttttcttgtatttaagagaaaatgggaggagagaaattaggggcttataaaaagggttaatgttgtaaaggaaaatggagaaatagagtaggagcttgatggagaaatggagtcaaaagaggttttaattttttctttcttttttagatgagagaaataacagatattggtatgctaatgagaataatccaatggaaagagggaaatcaatgcagggaaaggggagcattaattgctggagctgttggcaagaaagaaggagagagacagacagaaagaaaaacatacctgctaaggggggagggaatagaacgtaggtgcctggtatctgatgacatcatggagatgctttatagtcctggactgctcaacttcatatttctttctaagtgagaataacaagccctatttggttaactagtgagttttcaggtttgtgttacatacacaagaatgcatttctaactaacatatcatgttacttagaagtgtgaggtagcaacagaagaagctgctaagagaattgaaaatgattatctttgagagtgggatgagaggctgtggggtggaggtaagacagtaaacagctgttttaattccaagtattctctgacattttaacaatttatacatgcattcctttaattgaaatccttttcaatcatgctcagtgtcagtttgggtcttctaagaagcagatggcaagatagtactagccatgtgagagatttgtgggggagatgtgaaagatgatgaagaagggagcaggagtaggtggggagagcttttaaactatgatgctagtctgaacatgtgaaaggagagagaaggaaggagggttggatagaaagaggtgcaggctgaagcatggtgctgagaaagtttcagccaggccaaatgttattcattagaggaatcccctgttggacaggattgggctggccctagtacccagtgatgctcagtcgttggctggtagccacccagggaaagtgtggcttctctccatcaactttaccgccagcctcagttcctcttgaaggagttctgagtggcatacagccatagccatcacactcacaaagatttacattaaaggatgtgtgtatgtttgtgtatacacacaacattgtacctgaggaatcttaaatgttcagctagtgagtttaatatcatgcccttgataattagtcttccttgggcaatttttttttttttttttttttttggagactgagtcttgctctgtcgcccaggctggagtgcagtggcacaatcttcgctcactgcaacctctgcctcctaagttctagcaattctcctgccttagcctmccgagtagctgggactacaggcgtgcaccaccacacctgactaattttttatttttagtagagatggggtttcaccatattggccagggtggtcttgaactcctgacctcatgatccacctgccttggcctcccaaagtgctgggattacaggcctgagccaccacgcctggcattttcttttgtttgtttgtttttttgagatggggtctccctctgttgcccaggatggagtgcaatctcggctcactccaacctccacctcctgggttccagtgattctcctgcctcagcctcctgagcagctgggattataagtgtgtgccaccatgcccggcttatttgtgtatttttagtagagatggggtttcaccatgctggccaggctgctctcaaactcctgacctcaggtgatctgtccaccttggcctcccaaagtgctgggattacaggtgtgagccaccgctggaccttggacaaaatttttattcctttccaagaaaaacaggaaatttacattgtatcttgactacttcaatccaaaattcaatgacctatgataattgactgatatattatttatgcttaagaatacagtagaatatttacccgattttgcaacatggttgtgacacaaagaaacacttggtcttctttttaataatatatctttgtatcatcaatcaacattttcttcctgttctcttcataaatggttatttctttgcttttattaattgttttcattttaaaacatttctttaaagaaactcttaatttcctggctccactgttggcattcatgactaataacgttttggaagcttccacgtattttgctacaaaggaagccagttcaggactattaatttttctcatatttattcagttatagttaatcatatgtgtcaagctaaatgagttcaaatctgaataatctaactcctctcttgttgtttttcacgtgtcttttacaaacacataccaaatatttatctagtttttaaagggagggtaaagttgtacttccatagttagctaatgagaagactttaataaattatatttaaatactagtactgattttttaatcaggttttatcagttttgtagaaacttaaaaagtgacttattttaaatttataactttgtattaaatgtacaagttagaatgtgatataaatrtatgtataaactaagcatctaaggttaagtgtgaaaacacagcaaatttatattcgtgatatttgagaatattacgttttatatatatatatgtcaatgtaactaatagagaaaacacataaggtacttttgccaaattgtaatttatatgtcccttagtttttttaataaagtgtttttttcaaaaataaaaatattaacttagcagataaactacttaacaagtgactgtgaaatgaaaagcagttataactactcataaaatagtattgtatataaaatgttcacagtggctctccacagtgaagaagtacctgtcctttggtagtcctgttggtcttagtggaatcctaggttgaattgtgaggccccactaagcatataaattggtctatttttgtgttcatccttctcccataatagaacagtcccttgttttatctgagccaagtcttccacctagacctaaagttcccaaactaggcacagaggcaccctgggtactacagtgaattcacaggcatgctgcaggatattttttaaagtctcaaggaaaacacagagactactgtcgaagatacaaactattagccccagatagttcagagtttcaatgttagtttatgctacattctttttcaggttgtcatagctatttgaagctgggttttcagggcttgctgtgataaaaagcagctactacacaataatcagcatagaacaggaattagggtgaggatgtccaatttgatttcaaaatttgacaagttttgtggtgcctgtcttctgttagtacacacaacttgttagtaagtagttawttaggaatgaaataaaaatctttttctttcaatctctgtgtattatatttccaaatggctattaacttattaggacataaatacttattaagttgctttaatctatttaataaatggaactattggtatttcttttggcctaggggcactgtaaaaaattagagagacacaaatggtactgtgaactgagaaagaataggaacctgtggccctcactttggatcccaaagtgggatccaaaccttctcaaacctaatgtgactgtcacttctctgatgtgcagcatagtagtggaaagcacagactgctccattttttttggtgtcaaattttggctttcccagctgtgtgamtttggggaagttacttcatctatttgtgccagtttttatttagctatcaaacaaaaataaaaatacctaagtcataggtttattatgggaactcagtaagttaacacatatgaaatacttagcacagtgtctggcacaggtacctgctttttaaataaataaataaataaataaataataaataaatttaacctgtcagtttgatcttcccagtcagcttttttttcagtaaaaaactttaaattaatttttttattgtgataaaaacatatggtactgtgtttttaaaacacaattgcccatctttaagtgtacagttcagtgtgttaagtatattcacattattgtgaaacagatgtccagaactttttcattttgcaaaacagaaactctatacccattaaacaacaatgcccccttttccccctcccctcaacccctggtaaccagcattctactttctgtttctatgaatttgacaactttagataccccatctaagtggaatcctacaatatatatctttttgttactgactggtttcacttacataatgtcctcaaggttcatccgtgtcgtagcatgtgacaagatttccttctttttttcaggctgaataatgttccagtgtatgggtatctacatttttttttctccattcatccataagtggacatctggattgcttccacctcttagagtttgtgaatagtgcatctatgaagatgagtgtgcaaatatctcttcaagaccccgctttcaattcttttggatgtatacccagaattgagatcactagatcatacgctagttctatttttaattttttgaggaaacaccatactgattttcatagtggttgcaccattttacaatctcaccaggagtgcatgaggattctaatttctccacatctttgctaacactagatcttttctgatttgttgttgtttgtttttgtggtagtaatcattctactatcaagctatgaagtagtatttcattgtgattttgatttgcagttatctaatgattagtaatgttgagtatcttttcatatgcttgttgggtatttatatatcatctttgtagaaatgtctatttaagtcctttgcccatttttaagttggattatctgattttttcgttgttgaattgtaggagttttaaaatgtattttgaggattaactctttcatatgttttgcaaatattttctcccattctgtaggttaccttttcattttgttgattgtgtcttttgatacctaaaggtttttaagtttgatgtcccatttgtttgtttttgcttttgtagtatgtgcttttggtgtcatatgcaagaaatcatgaagtccaccccaatgtcataaagcttttcctctcttttcttctggaagttttatagattgggtccgtgatactttgcttttccagggttctctctctacatttctgtctttaatccattttgagttaatttttgtatattatgtaaggtaaggttcaacttcgttcttttgcatatgaatatccagttttctcagcatcgtttgttgaaaagattgttctttctccccatcgaatagtcttggcacccttgtggaagatcatttgaccatttatgtgaggatttattcctgggatctcttttctgttccactggtttatgtgtctgtttttatgccagaaccacactgtttttgattagttttgtaatatattttgaaatcaggaaatgcgaatcctccaactttgttcttctttttcaaaatggttttgactactggggggcccttgatattcccagtcagcttttaaacaggctcaactcttctccatttaaacaaatgaacccaactcttggtcagtaccacattctcctccaggtaccatcatatcatatccttctccttccaaatcagatttctcaacaaaattgtctgtatttagagtctccatttccttcttgcttactcagcattcaccaactttaatcatgcttttttcctgattattacacagccaaatcttccactaaggttgtagaaaacctccatatcactgaatctagtagatgtaaaaaaaatcttatcatcttaaatacacagtagcagttaacattactgagtaccccttgttcttgaaatttttttttttttttggttctttcagtgttctctctatttctttttcaggtccgtgttcctttcccccgtctttgaatgttggaattcctcaaggcccaattctgaaccatctgctctccattctgaacttctagattatcaaatttataaccacagcttccatggttcctcctagagctcaaacctctcccctgtgctccaaggttataaatccagctgactacttaatgtctccccttaagcagctcaaagatagctcagacagtatctttaaaatgaaacgcagagacccctctttggtcctcttccaccattcccaatctcaaggaatggccctgacttccatccatttatagaaaccagaaacctggaagtcagctatttatcttcgaaattatcctcttctttatccaactccttctttccccccatatccaactaatctctggttcttgttgattttagtttctaaatttctctcacctctgccagaggttctccatccctttctgcatatttttagccagaacctcctcacttctctctctagactacttcaaaacttcctaaccactctgtctattccgtgtgtgcccctaccagtctgctctccacatagtagtcagaatgattttttatttaattaattatttatttattttttattatacattaagttctagggtacatgtgcacaacgtgcaggtttgttgcatatgtattacatgtgccatgttggtgtgctgcgcccattagctcatcatttacattaggtatatctcctaatgctatccctcccctctcctcgaccccatgacaggccccggtgtgtgatgttccccaccctgtgtccaagcattctcattgttcagttcccacctatgagtgagaatatgcagtgtttggttttctgtccttgtgatagcttgctgagaatgacggtttccagcttcatccatktccctacaaaggacatgaactcatccttttttatggctgcatagtactccatgatgtatatgtgccacattttcttaatccagcctatcattgatggacatttgggttggttccaagtctttgctattgtgaatagtgccgcagtaaacataygtgtgcatgtgtctttatagcagcatgatttataatcctttggatatacacccagtaatgggatggctggatcaaatggtatttctagttctagatccttgaggaattgccacactgtcttccacaatggttgaactttttaaaaaacaaatttgttactcctctgcttaaaacccttctacaactttggaggacaggtgggaaactggaaactgattaaaagggatagagaaacgtgggtaaggggatacagggatgagaagaagacttttaatggtacaccttggtataatctgctgttgtgttcttttggagctacatgaatgtattatatattccaacatgaatcaataatttgaattttaaaaattataacatcaacaaaactggtcccaatctacctgcattttaaatttcatcccttactgcactcttttttaatctcattggccaagctacaccaggtgtattaggccgttcttgcattgctataaagaaatacttgagactggatagtttataaagaaaaggggtttaattggctcgtggttatgcaggctgtacaagaagcatgttgctggcatctgcttggcttctggtgaagcctcagggagctttcaatcatggtggaaggcaaagggggaagccagcatctcacatggcaggagctagagcaagagagagtagggatgggaggtgctacacatttaaacaactaaatttagtgaacactgtctcactattgccaggataacaccaaaccatgaggaatctgcctctgtgacccaaatacctccccgcaggccccacctccaacactggggattacatttcaacatgagatttgggtggggacaaatatccaaactatatcaccaggcttctgtcaatcccttatattctacatactatctcttgctacctggcctttgcatgcaccattcctagctctgcctaaaatgccctttgcttccccttacatggaagtaacacattctcaaccttagatcccagactatcagttgtctcttcctcaaggaagccttcccagagaagctttatcctttattttgtggttttagaacatcatgtatttcctttttttctgcttataagagacttagtggctgggcgcagtggctcacacctgtaatcccagcactttgggaggctgaggtgggtgaatcacgaggtcaggagatgaagaccatcctggctaacatggtgaaaccccgcctctactaaaaatacaaaaaattagctgggtgtggtggcaggcacctgtagtcccagcaactcaggaggctgaggcaggagaatggtgtgaacctgggaggcggagcttgcagtgagccgagatcgagcaagactccgtttcaaaaaaaaaagagagacttactttattttcatgtattttttgttttgtttttttctcttttattgatacataatttacatatttgtggggtacatgtgagtgtttayatgcaaagaatgtgtaatgatcaagtgtgagtaattgggatgtctgttaacttgagtgggtagtatttttacatgttggtattacttcaagttctctcttctaattattttgaaatatacataatattgttgctaagtatagtcatcctattctgctatcaaacattataacttatttcttctatctaactatatgtttggactcataaccgaactctctcccccacccccgattcccagtctttggtatctgtgccttctattctctatgtccatgaggtcaagcttttagctcccatatatgagtaagaacatgtagtacctgtctttctgtgcctggcttatttcatttaacatactgacctccagttccatccatgttgctacaaaatgcatgatttcattattttttatggctgaataatattccattggttatatacaccacattttctttattcatcgatctgttgatgggcatttagattgattccatatctttgctgttatgaatagtgctgtgataaacatgtgagtgcagatatccttttgatataaatatatttctttttctttggatagataccaagtagtaggatttctggattgtatggtagatctccttttgttttgtttttcttctttttttgagacagaatctcactctgttgctcaggctggagtacagtggcgcaatctcacctcactgcaacctccccctcccaagttcaagccattctcttgcctcagcctcctgagtagctgggactacaggcacatgccaccacttctggctaattttttgtatttttattaggcacagggtttcaccatgttggccaagctgttctcaaactcctgagctccggtgatctgcctgcctcagcctcccaaagtgctgggattacaggcgtgagccaccatgccaggcctccttttggtttttgataaatctccatactattttccatagtggttgtactaatttacattccaaccaacagtatataagagttcccttttctttcttgccagcatgttattttttgtcttttaaataatagccattctaactggggtgagatgaaatcacattgtggtgttagtcatatacctcttgtctatatgtatgtcttttgagaaatgtctattcatgtactttgctcatttttttaaatgagttttttttttaactgttgagatgtctgaattccttgtatgtgctgggtattagtagtcccctattggatgagtaatttgcaaacattttctcctatacaagaggttgtttcttcactctgttgattgtttcttttgctgtgcagaagcatgtaaatttaatatactctcatttgtctatttttgtttttgttgcctgtgcttttgaggtcttagccataaaatctttgcctaaaccaatgtcctgaagagttttccctagaactactactatttctagtagttttatacttttgggtttaatccatcttgagttgacttctgtatattgtgagagataggggtccagtttcattcttctacatatagaagaataagtggttatcatttattgaagagggttttctttccccagtgtatgttcttgagggctatggagaagatcagttggctgtaaatatgtggatttatctctgtgtctctagtctgttccattgatctatgtgtctgttgttayacgaatatcatgctgttttggtttctatatccttgtaatatgttttgaagtcaggtagtgtgatgcctccagatttgttctttttggtcaggattgctttggctgtttgggttcttttttggttccatacaaattttaggattattttttctatgtctgtgaaaagtggcatgggtattacattcaatctgtagattgctttggatagtatggtcattttaactatgttaattcttttaatccatgagcatggtattttcttttcacttgtttgtgtcctcttcagtttctttcgtcagtgttttacagtttttcttgtagagatctttcactaaattagttaaatttattcctaagtattttattttttgtagttactgtaaatgagattgtcttcttgatttctttctcgcctagttcattattgttgtatactgatttttacatgtatgctgatcagtgtactactgatttttatatgttgatttttgtatcctgcaactgaatttgcttatcagttctaagagttttctggtggagtcttttggtttttctagatataaaatcatgtcatctgcaaagagggacagtttgaaattctgttttccaattcgaatgcctttgatttttttttttttttcttgcctgactgctctgtctaggacttctagtactatgtcgattaggaatggtgaaagtgggcattcttgtcttattccagttttttttttcttttttttttttttgagacggagtctcacactgtcgccaggctggagtgtggtggtgcgatctcggcttactgcaaccttggcctcctgggttcaagcgattctcctgcctcagcctcccaagtagctgggactacaggtgcacaccaccacacctagctaatttttgtatttttagtagagatggggtttcaccatgttggccaagatggtcttgatctcttgacctcatgatctgcctgccttggcctcccaaagtgctgggttacaggcgtgagccaccgtattccagtttttagagtaaaagctttcaacctttccttattcagtatgatggatggtctttctatgcctagtttgttgagagtttttatcatgaaggagtgttgaattttattacatgctttttctacatcttttgagatgatcatataatttttgtctttcattctgttgatgtgatgtatcatgtttattgatgtgcatgtgttgaaccatccttgcacccctgggatacattcttcttgatcatgatatattatcatttgatgtgctgttggatttggtttgttagtattttgttgacgatttttgcatctatttttatttagggatattggcctgcagttttacttttttgttgtatccttgtctggtttcggtatcatggtaatgctggactcatagaatgagttagggtgaattcattcctcttcaatagtttgaggaggtttagttcttctttatacatgtggtagaattctgcagggaatccacctggtccttggcttttctttatagggagactttttatactgattcagtcttgttattggtatgctcaggttttctgtttcttcctgattcagtcttggtgggttgtatgcattcagcaatttatccatttcctctagattttttagttcgttagcatataattgtacctcttagtccctgatgatcttttacatttctgtggcatcagttgtaatgtttcctttttcacttatgattttatctgggtcttctcttttgttcttggttattctagcaagtagtttatccattttgtttgtctttttgaagaaccaacttttctttttttgttttgagatggagtcttactctgtcacccaggctggagtgcagtggagcaacctcggctcactgcaacctcggctcactgcaacctccacctcccaggtttaagtgattctcatgcctcagcctccctagtagctgggattacaggcatgtgccaccaagctcggcaagtttttgtatttgtagtagagacagggttttgccatgttgcccaggctgggcttaaaggcatcaagtgattcgcctgcctcagcctcccaaagtgctgggattacaagagtgagccaccgtgcctggcctgaagaaccaacttttcatttcattgatcctttgtaattttttttagtctattttgtttagttttgctctgatctttattattttcttctctctgctaatttggggtttgatttgttcttgcttttcttgttccttgaggtctatcattagattgcttatttgaaatctttctgtttttttgatgcaggtgtttattgctataaatttccctcttagcactgctttcactgtgtcccaaaaacacagcacaggcttgggtatattgkgtttccatttgcatttatttatttattcatttattatttatttattttagacagaatctcactcactctgttgcccaggctggagtgcagtggcgcaatcttggctcactgcaaccactgcctcccgggttcaagtgatcctcccacttcagcctcccaagtggctgggattacaagcatgcaccaccacgcctggctaatttttgtatttttagtagtgatggggtttcaccgtgttggtcaggctggtcttgaattgctgacctcaagtgatctccctgccttgccctcccagagtgctgagattacagcgtgagccacctcgccttgcctccatttgcatttattttgatatatttttcaatttccatctgaatttctttattgatccaatggttgtttaggagtatgttatttaatttccatgtatttgtatgctctttaaagtttctcttggtagtgattcctcattttatttcactgtctgagaatatatgtgatatgatttccattttcaaacttttgttgagactttttttgtggcctaacatgtctaatcctggagactgttccatgtactgatgagaagaatgtgtattctgcaggttttggataaaatgttctgtaaatgtctgttaggtttggtctaaagtctggtttaagtccaatatttctttgttggttttctgtctagatgatctggctaatgctgagagtggactgttgatgcctcctactattattgtgttggagtctgtctctttcattagatctggcaatatttgctttatgaatctgggtgcactagtgttggttgcatatatatttagaattgttatatcctcttgctcgattgatccctttatcattgtatgatgacctttgtttttatttttatttttttactgtttttgagttaaagtctgttttatctgatataaatgtaactactcctggtgtgttttgttttccatttgcgtggaatatctttttccatccctttactttctgtgtgtgtgtgtgtgtgtatatatatatatatatatatatctttacaagtaaagtacatttcttagaggcagaatattgttggatcacggtttttaaaaatctgttcaaacagtctatatctttttaagtggagaatctaatctgtttacattcagatttattgctgatatgtgaggttttgttcctttaatattgttaattgtctttaggttgctttgtatagtctttgttcctttgtttttttcctttctgactgtctttgtggattgctgtttttctgtggtggtaccatttgagtctttcctctttctcatttgtgtatttgtattaccaatgatttttatattttcatgtgttttgatgatgggaattaatcattctttcacttccagggttaggactcccttgagcctttcttgtaaggcaggtctagtagtgatgaattgcttcagcatttgcttgtctgtgaaagtatttctttctcatttatgaagggtaattttgatagtatctttgggtggttatatttttctttcagcaatttgactatattttttcattctctcctggcccataaggtttctgctgagaagtttgctgttagtctgataggggctcctttatgactagattattttctgctgctgtttttagaattttctctttgttaatgactttagacagtttgcttataatgtgctgtggagaagacctttttgcattgaatctgattggggtcactggatcgccagtgtctggatgtctaaatctcttgctagacttgggaagttttcatctattattttaagtaagtttttgaactttctcattatctccacaccttcaggaatactgataactcctgtacttggttgctttatggtatgctatttatcacagagactttgctcattctttatttttttatttttttatttttattttttattattatacgttaagttctggggtacatgtgcacaacatgtaggtttgttacacaggtatacatgtgccatgttggtttgctgcacccatcaactcatcatgtatattaggtatttctcccaatgctatccctccctcagtcccccacccccaaacagggctcagtgtgggatgttgcccaccctgtgtccatgtgttcattgttcaatgcccacttatgagtgagaacatgcggtgtttggttttccatccttgtcatagttctctgagaatgatggtttccagcttcatccatgtccctggaaaggacatgaactcctccttttttatggctgcatagtattccatggtgtatatgtgccacattttctttcttttttttaatatatatatatttttattatactttaagttctagggtacatgtgcacaacgtgcaggtttgttacatatgtatccatgtgccatattggtgtgctgcacccattaactcatcatttacattaggtatatctcctaatgctatccctaccccctcctccctcccccmaccccacaacaggccccagtgtgtgatgttccgttccttaccctgtgtccaagtgttctcattgttcaattcccacctatgagtgagaacatgcagtgtttggttttttgtccttgcgatagtttgctgagaatgatggtttcctgcttcatccgtgtccctacaaaggacatgcacccatccttttttatggctgcatagtattccttggtgtgtatgtgccacattttcttaatccagtatgtcattgttggacatttgggttggttccacgtctttgctattgtgaataatgccacaataaacatacgtgtgcatgtgtctttatagcagcatgatttatattcctttaggtatatacccagtaatggcatggctggatcaaatggtatttctagttctatatacttgaggaatcgccacactgtcttccacaatgattgaactagtttatagtcccaccaacagtgtaaaagtgttcctatttctccacatcctctccagcacctgttgtttcctgacgttttaatgattgccattctaactggtgtgaggtcatatctcattgtagttttgatatgcatttctctgatggccagtgatgatgagcattttttcatgtgtctgttggctgcataaatgtcttcttttgagaagtgtcggttcatatcctttgcccactttttgatggggttgtttgttttattcttgtaaatttgtttgagttcattgtagattctggatattagccctttttcatatgagtagattgcaaaaattttctcccattctgtaggttgcctgttcagtctgatggtagtttcttttgctgtgcagaagctctttagtttaattagatcccatttgtcaattttggcttttgttgccattgcttttggcgttttagacatgaagtccttgtccatgcctatgtcctgaatggtattgcctargttttcttctagggtttttatggttttaggtctaacatttaagtctttaatccatcttgaattaatttttgtttaaggtgtaaggaagggatccagtttcagctttctacctatggctagccagttttcccagcaccatttattaaatagggagttgtttccccatttcttgtttttgtcaggtttgtcaaagatcagatagttgtagatgtgtggtattatttctgagggctctgttctgttccaatggtctatatctctgttttggtaccagtaccatactgttttggttactgtagccttgtagtatagtttgaagtcaggtagcgtgatgcctccagctttattcttttggtttaggattgacttggcaatgcaggctgttttttggttccatatgaactttaaagtagttttttccaattctgtgaagaaagtcaatggtagcttgatggggatggcattgaatctataaattaccctgggcagtatggccattttcacgatattgattcttcctgtccatgaacatggaatgttctttcatttgtttgtgtcctcttttatttcgttgagtagtggtttgtagttcttcttgaagaggtccttcacatcccttgtaagttggattcctaggtattttattctctttgaagcaattgtgaatgggagttcgctcgtgatttggctctctctttgtctgttatgggtgcataagaatgcttgtgatttttgcacattrattttgtatcctgagactttgctgaagttgcttatcagcttaaggaaattttaggctgagacgatggggttttctagatatacaatcatgtcatctgcaaacagggacaatttgacttcctcttttcctaattgaatatcctttatttctttctcctgcctgattgccctggccagaacttccaacactatgttgaataggagtggtgagagagggcatctctgtcttgtgccagttttcaaagggagtgcttcccgtttttgcccattcagtatgatattggctgtgggtttgtcatagatagctcttattattttgagatacatcccatcaatacctaatttattgagagtttttagcatgaagcgttgacttttgtcaaaggccttttctgcatctattgagataatcatgtggtttttgtcgttggttctgtttatatgctggattacgtttattgatttgcatatgttgaaccagccttgcatcccagggatgaagcccacttgatcatggtggataaggtttttgatgtgctgctggattcggtttgccagtattttgttgaggatttttgcatcagtgttcatcagggatattggtctaaaatcctctttttttgttgtgtctctgccaggctttggtatcaggatgatgctggcctcttaaaatgagttagggaggattccctctttttctattgattggaatagtttcagaaggaatggtaccagctcctccttgtatctctggtagaattcagctgtgaatccgtctggtcctggactttttttggttggcaagctattaattattgcctcaatttcagatcctgttattggtctattcagagattcaacttcttcctggtttagtcttggaagggtgtatgtgtcgaagaatttacccatttcttctagattttctagtttatttgcatatatcttttttctttatttttgtctgactgggatgttttaaaagtcccttcttcaagttctgagattgtctcttctgcttggtctagttcattactgatgcttttgactgtattttgtatttcatagaaggaattcttcagtttctgtatttctctttggttcttttctatatttctctctttggtaaatttctcgttcatatcttgaattctttttcttatttcgtagtattatttttcaggattctcttgtatcttactgagcttctttagtatcatacttttgaaatctttttctggaaattcttgaattctttttgattggaatccgatgttgggggattattatatttctttggaggttttatatttccttgctttttcrtacttcccgtgctcttacattgatagctgcccatctggtgtaatagttgtttcttccagttttttgaatttgtttttgtaggggatgactttttcctgaagttatatcaattctcttggttggatggggtgttttggctttgattctgagtgtgttcagtagtatagtctctctatgatttcttcatctggaaacagcatcagtggtatctgtgatttcctcagtggtttagggtgtggttatttgtgggggctatggtgaagttttgctgaggacaggggtgccagttgggctagtcttcaggccccagtggtagtagtggtgggctgagtgtgcctgatcttgggtcctggggctgtgtgcagtggcactggtgttagcagtaccaggcaggtcagttactggaccttcagatggtttgtttaaatgttagtagtggcagtggtgggccaggtgtgtgagtgggttcatgagtccccgggcagctggcatggtatgggtgatgccagtagcagtggtgggatgactctttcggtcctgggtggtgcatactggtgttggctgtggctgcagtgcggggttgccacccacagccccagacaggtagcagcaccacagtgctgctcagcaatgggggaggaaccctgtctctcacatgtaagcctaggcatggaggccattccactgttggggactcagtcaccactcatagccccagacaggcagccctccagctcacttactgactatgcctgcagtggtgtgtggaaaggaagaaggagtcctggtttctatgtgtgagcccaggagcagagtttgtgctactgcttgaggcacggtcacttctcacatccctagatagggagctctggggctctggaaagcatgcactttgctttcctttgtcctgggggctccctttttggtgcactgcactcttctttccccgaggattagtactctctgtaggctaaagtactggagaccccatggcacctttgggaccaaccagtgctgtattgctgtagccttctgagtggacactgggatgtcagtggaagctgttaggatgtggatatatgggggctgtggttttcagggcaggatgcagtcctgtgacagctgtgtaatggtgcccagctgcagccacttaggtctcaggggtagggtccatgacccagtacaagttttctgtctggggtagggtccatgacccagtacaagttttctgtctggtgtagtgccctctcagggtctccaaatcacaccatgctaatgtcggggtttgtgtgggtagaggaggtctcttgtggttcagattgcagcagtccatagtggggatgtggaccgctgaagttttgtgacttactctttcctggcattaccaagcscctcagggtcccagtcaatcttggatgaggtggccacttgctttcttttccttctgtacctcaggtgtttcccatgacttctctgttagactctagttctctcctagattttctattcaaggtgcaattatctattcataattttggtccttctttctggaaagtgggggggtatctgatgtctctaatcagccatattgaactgcatttcatgtacttcttgacacttattgcagttccagctggacatttattgtgtgaccatctaattactaactacctcactgacttgactgaaagtttcaggagagaggttatcaaatatttgggaggagaagttgtaaaactccctgcaaatattttgtgatagatttttttttcacttttattcaagttgttaattgataaataataattgcatatatttatggggtacaatgtgatgttttgctataggcatacatagtggaatgattaaatcaagctagttaacatakccatcatctcacataccatttttttttgtggtgagtacatttgaaatctgatactttagccattttgaaatatacaacacattattattaactttagccactgtgttgtactatagatctctaaaatgtatttctcctgtctaacaaaaactttgtaccttttgaccagtatctccccatttcccctacccctagcatggtaactaccatcatactctctagtgctatgagttttacttttttagattccacatgtaagtgagatcatgcagtatttgtctttctgtgcctagcttatttcccttagcataatgtcccacaggttcatccatgttctcacaaatgacagaatttccctttttaaaggctgaatagtattccattgaggatatataccacatttactttcagtgatcgtttttattctcaaagattttggggtttcatatttctaactaaacaaaacataatggtaacaatttaacagtactcactctaagagatttctgctgtgcttaaactcaccataatactctatgctgataaatgaggaagcatatctcattgcatattaagggtgtgtgtgtgtgtgtgtgtgtgtgtgtgtgttgatgtatttttaattaactcaggtagcatggttgtaagtctttgagaggggcctgttatatgaaaagttgccaagcttactttcttgaaacattattcaaagattattatttcatggactctgctttgagaaatggtcttttttcatttattcttttttcatttatgccacattagtatggattatggaggagaactggaagttgtaaagggcaacggttgagtgtggtcctagtaaaagagaatggacaaggaggtatattaaaagtggtagatctgagctaaatggaacaaagagtatcagcagaatttactgatgaatttgaagtttgttagctaaaggtaagagattaaaaagtgcgatctcataccaaatgaactgaaaagagatttagtggagatctttattccctcttttaatgtttttaaatttaaaataataaaatgatttctggtaatcataaaatggcatagtatacaaatagatatatagtaaaaactatatgcctacccgaaactcattcccttctccagtagtaactgtgttcagcaatttggcttatatcttttttcaaacactcatctgtgtatgtgtatgtatacacacatttaaaaataatggaatcactctatacatatttttctctaactttctttacgtaacaatatatgaccatctgtcaatgatctatatctacctccctatttttactagatacatagtaatccataatttgtatataccatactttacaattattaatggcaatctttttagtaaatatggaaattggacatagatgagtaatcaaggcaatgtaataagaacaaaatggtcttaaaattttttaataagttaaatagcagagacgagggactcatttcagtttcttatttgatccttttagtgaggaacaactcttagtgcattttcagtattccgacttttgagaaacacatttctagcatctctttaaaaccataaaataagaagtatatttgtggccagatattttaagcgttcccttttttgaaaatttttatagaaaaatactgaataacacacaaaagttttaaaaaatcatccctaatatcaatttttaaaaattttataaggcaagaagttgaagtttgtgctctctgggttccaattttatctctgtgagatgcctgctatcaacagctttggttttattttttctgatattttcttgtgtttctacaatttctttatacgtatatgtacccatactactcttgtttttttcctagtaaaacagaatgatgctacttgtgtaggtctgtaacttttaaaaatgcctccccccaccttcaacaaggtatcatgcagttgggaaaaaatttctgattaattaaacttatttatcttttatgttatctccatttattttcttgtactaacaacattaacaatagccaaattcagatgtgactgatttattaactggaatggcaatttattaatttactatgtgagatatatttggcattatagacattgctcatttccttggggcattacctcacggataagttattcaagagactgaagtataaataagaaggctgattggtgagcagagaatgagaacaaaggcaagaaggtgttctaacaagatatttctttcaagctaaggtagctcaattacttgctatggggcactttcaatcttgaaaagtagcattagtcatcaaagtgatagccctgaacatggttagagacacacagggtgggtttcctgtggactgctgatctggactgtgcactgcccaccactccatttgagatatctgaccaggctgtcatacatgagagaggatagcttatcacattaccctttctttatgtgagaaaaggattgattaaaatttgggaagtttccaaatctgcctaatgaagacatggaaaacatctttgcttccacagcaactcatttaaaagcactcttttaaagagaggctctgggaagatggctaatatataaaggtggtgacagctgcagtgtctctagacgttgccagatgtcatgtctcctggtggccaaaatcatccccagttgagaacacatgcacagttcccaatagggtttacctcctatgagaatgtaatgctgcagctgatctgacagggggtagagctcaggcggtaatgcttgcccactcaccgcttacttcctgctgtgtggcccggttgctaacaggccacagatgggtactggttagtggcttgggcattggggacccctggtttagagggagactggtttgagtgaggaaaagagctggagagagaaaaatcagatgggatattgcatggaagtcaactgagaagtgagagttaaggatattagttcctaaatagtggtgaaggagtatataggatttgtcattaatagacctgtcttggtctccactttcccactaattatgagacctttgattaattgctttacctttctgattgggaattagtatgagcatgagattaaccttattactattgtttttaaaacttgcatacttattttgtatcagttatactgtcattttacatgcattatgttgcatataaaagtcttctgtaaattacaaaataatatacaaaaaaaagtgttatctgatttgcctttctctttacttctcaccactgcttttaactctttagatctttaaaactactgacaaatacaaaatctactttcggaccttgttttattttgagatgcctccctttaccaccttgcctgctcttttttattttctgagctaccagaagcctccctccaaccccttgcaatggaatagaacactgtcttggtgctctttttcttttttgtcctaccaaatttgaccatgtttctgtggtcaaatactttctaggaatgatcacttttcttttatggaaatatagttagcaggattttaaagttacattagggattgaaatatggcatcatttgttttataatgagaataagtgagaaaattaggtttattaaattgaaatagactttgcaggcagatttctaggtacgttgtattccatatattgaataacaccgtacaaatctttgggaaatcccactgggagaccccagtgaggaacctcacttctctatccagaaaaatacttgtttatttcttgttcttttgttttttctccttaagtcagttctctgtagtaaatcaactaatttttttttaattcttaactatatttacttttgtttcctgacatgtaggaggcacttacgtgtttttttttaacttactgaatgaacaaaactcagatgttatttatgttttgtttcaattaatgatgtcatctgatataattttctcatttccctcaaagtaccgtttcacttccaatttaatccccagtctaagtactgtagactttagggttaagagaagccaatttgaagagccatctggggattgtgagaatcatttctgagtttcttaaagagaaagcttaccttcccagtatgagcttatttgaagaaaatgaaaaggagcaaatgagaaaggcaacataaagagacatggtcagagcaggaataataaggaaggtactttttgtctggcggggtgtcaaagaagaagaagagtttcggtttctatttgcctcagttatctcctgcacaacatttaaacaacattcaaattgggacagtgttgggagataccactggccttctcgttggttcatcctgcgggtcttttcagttcagatctgcttcagagatgcctccctttaccaccttgcctgctcttttttattttctgagctaccagaatcctccctccaaccccttgcaatggaataggacactgtcttggtgctctttttcctttttgtcctaccaaatcttacatagaccctttccattttggaggtcttaaggactaaccactttggggaaacaggcagaggtgagaatagcactttcctgtctgggctggaatattctttccttgactatatttttctaactctagttgtctcctttacaatatccaggagtatttttggcaccagtatttggcaactctatgcttccccataggctgttttataaaaatgcattaattagcttattaattgatttataccttcttattccaaaatctggtgtcagggatgcctctagtccataggacatttggaaatatgaaatgatggacatacttgatctttcaagtatccaaactcaggttcaataagagggctaaactgatcttttgggtcagaatgtcccagagctcagaccttagatctctttctgtctttccactcattttttaaaggagagcatgtccagtaccatggctttaaatactacctttgtattgttgatgactcccagatatacctctgtagtcccccatgaagttcagacacatttctgattatgtactagatctctccactggtatgtccataaatactttaaacttaacgtgtcagaatcaaactcttgattctccataatctaaatttgcttttcttctagcattcccaatcacagtaaactgttgctcaggccaaaaatctttgagtctttctctcatgtgccacattcaatttttcagcaagtgctagtagatactttttaaaatatatctcaagtctgcccacttatcatttccttcagcattaccattctagtcccaagccatcatctctcacctcaaccactgcaataggcttgtgatggtctccttgcttcactcttgccctgatcccccgctttaaaacataaattatattatagttctgtgctgcttaaaactcagtgacttctcatcaacaaggtctaacctaatctggtccttgactgcctctctgacttcatcctctatgaatatccctttcacttactcccctccagccacactggcctagctttcttcaatcagcctaggcacattgccacctcagagtttttgcattagctcttctctctgcctcgaactccttttctccagatatttatgtggcttgttcttttacttcatttgagtctatattcaaatgttatttcctcagagaggcttatttctttattagccatcttgcttaaagtagcaccctcctaaatttgctctatagttcttattgctattgtacattatattaaaactatttgttttattatctgtgtccacacttgaatgcaggctccatgaggccagggagggcaagggcattgtctgttttgttcattgctgtattctcagcacttggaacagtgcctggctcatatgatwtactaaatatatatattttggggtaaatgagtgaatttatgaaaaagtggctgtacctattctttgagaaggattctgaaggaatgtccaacctcacttggcaggatccatagtctccaaatcactgctcctgcctccatgcatagatcagttatctaaccagtgtatgcatgcttttggctccatgacactcacccctctgaatcttttccggcataagttccctcatttacttactctcacaggctgtactttccttcttcatctcataaaagtgggtttttaaaagaattttataacaaacgctcatacatagaaaaagcagtttttgttaggatatgagatttatttcatgagagcagtggtgagaacagaaaacaaggtaaaagaaattagacacttggaaaaattaaattccagagttctgaaggaacttgcaaatattttggagataatatccttgtgaaatcatagccaatgggagaggcaacaaaagattgcattttttactaattgtaactcacctgagtgtcacacatctaacattgagtccaacctgggttacaaggtttttaaaaagacaaatgtgctcagagttggttaacaacgtagtgaggatatttgttatttgatataggattcaaagggrtgaacgtcatggaggcaagagcatgcatacattggttagataactaatctatgcctggaggcaggagcagtgatttggagactatggacagcatcctacaattaatggttgaataataataataattgcaaacactgtgtgccaggcattattctaaatgttttttgtaaaaagttatttaatcctcatcctatgaagtagatactatcatgtttattttcaggtgaggaaatgaagggacagagaggttaaattacactgtcagtgtcacacagctagtaacaagtagccaatattgattttattctgatttcagagtctgtgctcttaaccactgtgttattatccttgaatatttgaggtgggtgctactgaagaataattggggtgactgttgaagttgtagggagtcagttgtatcctcagcctcaatctcaagagtcaccacctccttctcagtcagactctgagtctacccagtatgtacttctataataggtctggtaaactggtaacagcactttattagttatttgctttgatctcgacctctttctattaacctactttatttaacctactttaagaattatatttgatttctttttgagcccttaaatttaatttagtgcttggcatataatgaatattcagtttttggtgaattaaaaaaatgaatgaaggatctttaaattgattacaactgacccatggtagaatagttttcctgtgaagcagtgagctcctgatcactggcaatattcaagcatgggctagatgcttgaagggatgctgcagaaggaacatccatgtcatatgaaaatggaaaattagaccaagtttttttttttttgtaactgcaaattatctggtgttccattgagttagttgtgattctttctccaaacatttgttgagcacctactgtattcctggcactacaaagataaatgtggccaagccaacatccataaggagctggtagtcagtgagtaattaggaaaagaagtgcttaagagtataggtgtaaagctttagtagataaaaataaatagaaaagggtagattttagagatgttttgaataaaggaggaaggggagaagtagatataaaagatgtccctaaaattgcccgtctgagaaggaatttggggagttaagaccacctgctgtgttgctatggggggattcttcaaaagggaaatatcaccatttgccattaaggtatgtggtagggctgggtgtaattcagtagagattaagttgtgaagcattttaaatttcttgaaacaaatgtgccttctcttagtagtctccaaaacccataaagatgattaagtaccctccccccaactctctgcccctgtagaggtattaacgcaaaatggaataatctgttaagtcaaataaaggtaagctttctggtgactaggacaagagttctaacagtaaatgcaaagcaactcttcagtttcttttctgaatcatgtgcctggaatctgttaggcagtgaggaatggtggtctgtctttatattaccctggtccctcatgctgcttatctttcacacatgtccaaatatgtctcaacacagaatcatcctctctagctgggacatgatgcctaggtgggtgggggattcccctgttttgtttaaaatcaaagttgtctttgaatttggctagcatgtttgtgattagtttactgacaattggttttttttcttcttataccatatgttattccatgattcatcagctttgagtctgttgccttgaaggtgaaacaatttcttccaatgttgatatttcataatctcatagataacaagcatacscatatgcatagtcctttcagaagttttaaacatttggagatgaatgaattatgctgccacaaatggaaaggagcagtataaaattataatggtgatatccaatcatcttttgttgagtggttttgtgaacactgacattgataaagcctggatgctctactatattcctttatttctccttgtgaaattgtttctgatatgtgttgtttatgattttaaaaatttaacattttacttaattgccttgatttacatgtattttaacattttagactgacaagatctttatttttagaagtaaatagtgtttaacttccaaataaatgcataacattagctgtttatattgtaatagtggcatctcttctatatttaatgtgtagcaatgactattcaaacctcaagaaatgttttagtttataatagtaatttttcaaaataatagaatacattacattttctgaatccaaaacaaagcagttatgtctgcatatgtgctttctaagtatttagaagattagatttctaataaacatggcctaaattaggtttctgcatgtagctttaatcaatgcatttattgtgttgcatcctttagccacctttctctttttactcacaatgtcagtaattgtttttcagtgaagaaaatctttataattttgtagtgtagatgcatgtgtaaaatatctgtataagttgtatatttggagagaggttttttaaagattctaaatcacagcatgtcttcctccctctctcccccacttacctggttttagctcctttttggttcaggtgtgctggtgtctctaagcctttctgggccgcagctggagaaagtggtgattgacagaagcctggtggggaagctcatctcagacaccatcagtgatggtaattacccccatgtgcaaatcaattgcctacattaacagtggggcaggagaaatagtgtgtcaacaggtagactaattattaccwctggggacttgcaaacacaacaagtaattgcttgtaatagcgtacttacaccccctgggaccaatacaagtttcgactaatatttaatatcaaagtttttttcttgtcaactgttaagcttatattctgagttgttttttactttttccttaaaagaagtgaacattttttcaaaatagggttttgttttcattctttcaaaattatttctctrtaactggcacttcaaatatatattttatttccaaatgaattttgaataaataacacaaatatatcaacacaaccaccagtacacaattgatgctttggctctcataggaagattctttgttcctaaagtcttagagagattttgggctatattttctaaatagtaaagaccaatgcctaatatactggacagtcaggtcctattaagtgacatctcaatcagtctgtaattggtacaaagcacataagaaaaagatattaagccagttattgaataggaaggatactgacatttattgaaccaaaaggctctatatgctgggttcctaacctacctatttaatacaagaaaacaattgtataaggtatagttatttccatttttacacataaggaaacgaagctgagctactaaggaacatgtccagagtcatatagctagaaagtgactgagctaagatttgaatacaggttcgggctgtgaagcccattttcctttcactatactgttctgactcctgaatttttaaagattatattcttttattcaaggtaaaaaggttgagaaacattgtattatcatgaaagattgaaaatggtcagtatcttaaatttagtaatcaaaggaagtatgtcctagtggaaaggacagaggtgagaataaagaaatcttccgtctgctgtgttctctcactagctacctctgaataaatcagacacaatcacatcatcttgaagaaaagaactctgcaggatggccataattagcaacattactgatagtaataagctgggggtaggattgtaagcatgccattttcccttccttacaggagtaaggtgctgaggaagcttccctgtagaagaggttccattttcatatgtctaataattgaccccttcattggtactgcaaataaaatactggctgtgatgattttgttatattgatgctcctcaatgagaattaaaaggaaactttcagcacaattcgtgtctctgagttatcctttttcatgtatttcttttatttgtacccaaaataatacactctcatgggaacatggtaacaatgtgatttcttggcagttctccagattctcttgtaattgtgtagatccactgttggtcactgtttgtatggtcaggggtgtgaaagtaaaggaaaatgtataaaacatttaataatttctttatgctaggaacaatgcaaaacatttctcaaattcctgtaacatgtttttatcaataattttatgtaacattaatagccctttatataatccacaaatattagttatttacctacttgtgtgctttggtgacaaagctgtagaaatattgtgctaattttcattattagatattaatttatgtaatgtacatattggtcataatatgctttatttcatccagcttgtatacccctaaaagaagattcactgatgaaaattttttaaataaatagactggtagagaacactgatcagtatcccctaataaatccactttrtcctcggatggtttctatcatgtaaacataggattaaactcttagcacaaataaaatggaatgttttcgtctctacattcaggtgcgaaatagttttttaaaaatacctttatagccctgtttctaaatacatctcatccattggtggtccccaaatatcagtgtatattgaaatagtcacaggaaaaaaaatcacatatgattagattgacaattattgtttattcctaatatctttaatatttttayaaaatgctataatgatattcaagagactttagtgatttcagttaatatgtatgtttgaaaatagctttttgtaacatatcagtggaaaaatctattcattattttattctaacttggtaatatctaattatgttttttagctcttctcacagacagttttatcatcttatcatttttggcacaaaacaaactatgttttattcagtttaccaagaagatggagtcttctgatgtaaacaaaagactggaaaaactctcagccttggattataaggtagagattttgatttatatagtcatattattaattattaaggtatatgagagtatcacataagttggtattctgctcattattcttcaacatttctggatttcagaaaaactggaaatattacaggattaagcttaattaactgtaaacagtggccatcctaagttttcttttatactctcactatggggggttgtctaacaatggcacgtttggagcaatttatatagtatttatagacatcaaagacagataatagaggcaagttacacttttgaaaatggttttcgtgccagtggtagtatatataccattctcattttcccctaagaccccatatcatctttctagggtaggatagctttctagggtaggatactttccacttcacaagaaaagaaagatgaaggcactttgaaaggttaatagaaaagtgtaataaacaaggagggggaagaaccctccccctccagctataactggacaaaatgcaaaaagaaatcttcatgtgttagtatctcacccttcactaattccaggtaatttgtttccttcctgtatcaggagctttacatctattaaggcagaatttttattttaagtgatgtgtttaatttgagttttgccacattacattttaactgctgggaaggcatattctctgctaggatgagtaatacattttccaggctgtttcagttcaaggcctcttttcaacagtgacttgtgtttgcaagattgatccaacctctatgatgtggatttgagacagttcactgttcactgggaacagagctgatatacagcttccttaaaaaagatgcacacttatgccatacctagagcatctgtagcaagagcaaagagtttgagaagctagctctgtagcttgaaatgtgtgtgtgtttttggcaaagtagtatttaacctaaccttttgccctttgggattattacttatgaatgaggtggtggtagcatgggaggatttagttttatttagtaggaacatttattcttaaaaaaagatttttaatgtggaataaaataaatgagtttttcattgtggtgataaactaccatctagtttcgtttgccagctttgtgaaacttctataaaaccttaatatagattttttaaaactggaaattagtgctacttattatatttggttagccaaaacaaaaatggtattagcattcttaaagggatgttagttctagaatggctaacttcagatttacttgaaatactgtttatttactaaaattgatcggtctttaaaatgcaccagtgtgcattaactcaaaccatttaaagtaagtatatataaaattctggatgagtagtttctttatcttaggtgtgatagcttgataaaatcttctcaactgaagagtagtagctacctgagaacagagagaaactgtcaagatgtcatcttttcttatgaaaagatgaggaaaagacatctagcgtttgggtccttaaaccttaagtaagggaattacttacttgcttattcgaatatgcctttggatttaggaaaataggaacattggcactccatgtcattcctatacattagagaagtaatctgtttcccttcggaaaactcattaatttcatttcctggtttaatatttaaaatgtatatttttaatacttagtcaaatctgctatttgtccattggaaggatattttaagaaatttgtttattttacattccctcttggtcatcatgacagaatactgataatattaaactcataggaaacatgaaatttcctaacatttcataacgtaagtgatttgcattatgtgacaactgaaaatgtcagtcactcattgtgactcaatttcctcatctagaaattcataggtaacacacttatgcagcaaatcagacattgaaataatgtatgtgtatttttaagtacttagcaatttcatcgtggtatttctctcaaataagaagacttaatgatattgagagcttaaatataagaaattacacttaatagcataaagtacatctgtgttgtctgtcattgcccatttggattttaaaacaaggaagtggtatagagtattgtacttttgcttttctttacagctgtaccatagtttaattctttcagattgacataattttggcaaagaaaattgcagagtaaacatccttaaactattgacctttaacaagttttcctgtctacatctgaaaaaaatccaattcaatttatttaacagtgaagggacactgtgaggagttaaatgtttaccatgagagaacaacactggtaattactttgatttcagttccttttgatgtgcattcagaggatgaagaggtcaataatattatggccatgcaaatagaaaagggttccttttgaccatattgaaaaaaaatagcagaggattattaaagcattaaccttggttttaatggccttggttgagtggtgagatcacaatttggatgagcctgattatttactaaatacaatacataaatgcaacgggttcttaacacccgttgcactctggcattatcgcattactgccatcctttgttgccttgcagacaggaatatgaaagcaatctgtcatgtagtgagactggctccagaagcatttctctgataagaagaccccctgccctttgctagtgtctggtccagtaggcttagccatgcgcttaatccccagaaagtggttcgattattgctgaccagcaatggcaagatagttttttttttcttccaagctatcaaccttccattaattccttaagcagaaatacggtgcaatctatatttccttggcatgtgtcacacagatggtgccgtgcttatgttttcaaataaccatgttccaaaataacatagtttgaataataaattctacaaatcctgcctaagaaagagaagcataattctcagaagctgcataaacttttatgcatgatgctgtggcttatcccttttatgcagaatatatgtgtatacgtcgcatatattctttaaagagatatttgcctcaagttgtttttcctttttttgttgtcagtcattgttaacacgttatgtcttaaacagtagtgagactctcttggtcagcagtactgaacttgtcattttatacagctggtcctaaatcatatgtgtaggtcgatgctgtcaggcaaccatgactgtacattttggtattgattggaattgctacattcaatttcttcctagctcacatttctccttttccttccttygctaaaaatggggagaattttgaacatatgtcttttttatatatgtgtcagaagaatttggtaaattctgacaccttcttacgcacatgtttaacatgcatatttacttgcatgtaactacatttccagatgctttaatttttgtaatacttgaggattttgcatcttttaaaagaaatgtttcatgtatgcttttttaaaattgttagattttctattatgaaatacccggcccaataaacaagacaacagagcgacatctagctatcaactgtgttcatgatagagttgtttgctggtggccactggtcaacgatgatgcttggccttgggcccccatttcttctgagaaggacagagccaatctactcctcctgrgttatgctcaaggaagactagaggtaaatctaaaacaaatatgtacattttaataaagtgtaaataaaatagaattattagattttctattctgaaataaatgtgaatattttttacctataatttatgtttttcaaatattcaaaaagtatcatatctagaagatacccagacaattccagggctggctagaatagtgtagtaattaagagtccaggcttccaggttcaaatgctagctctgccactatgtagcttcctgtccttgaccaagttactaacttgtatgtgctatagtttcattatttgaaaaatacagttcatgatgataaatgagttaatacatgcatttagagcaatatcaatgtatagtaagccctgaatcactgttcactgttatgactcttgttattatcattattagttctattattactgtttactcatgatatcatgcctgtgaaagcttttattaccaattactctcttcagacttcagtcaattaacaaacattagttaaatgcctatattgtgtaaggccctgtcgtgccagaccgcatttggcgcaaggatatttaaggagagctatagattatgaggtgaggacagtatcctctatcaattcatgataatggtttgatcatccattcatatatgtgaacctatgtgtattttcagtttgtactagtactttggttacagaattctctgttttgttgtattatagctgtaaaaaaagctccctctcccccactttcttatgtaggtaaaatagtatgttcctatatttgcctctaaatcagttatcttttagactttaaggagtatttcccagaattagtattcgagataagatgaatactctaagcttctgcctgcttctagctaattctgtgttctgtgcctttgagtagatcacctaccctatctgactttagttttcttatttttaaaacgattgatttaattcagttaggtcacctcgaggtctctaacaggtctaaaaagtgcttctatggatcctgaagcacagatctgatttagacattgcctgcttaaaagtcttctgtagatgctaaaaccaaactcagcctcagcactaaaaaacccaccctgattgcccttggcctgcctttccagtgttgtttccttacataaaccatgtcttagtcaaatgaatttacttgctgactcattatttcctacctctgcatgtgcacattaatggtatttctacttgaaatagccatgtcatttagcaactacatatcccctggtatgaaaaacactgtatttcataccaggggatatgaataagaaactgtccctgccttcaaggatcttagtgtctgccaataagagacaaatatgaaaatgtgtaagtgcattaaagtgttaatggtgctgtgggtagagtatgtgtaagctatagtgggacccaacagaaagtggtgatcgattctacttagagagatgttaagtagggaagattgaagaggcttcccaatgtgcttaaatatgagcttggcacacaattttactttttaaaattatcctttcttatctcacctttctagagttgatattattagctctgtggaacgatttggctagctttttccttttctcctctctgtaacagtaccaaaaggaattgatacttgaaagtttgataaaacttacctgtaaaacttcctgggtgtgacgtcttttaaggagggtagatttttttcattactgattccatttttaaagggttgtttttttccttttttttccacaattggtgtttatagaaaattattcattttatgcatttgaatattttttcataaagttgtatgcaaatttctacatgattctttattcaccactgattgtataatttcctcccttttgatcttattaagatatataattcatttttttctcaagagcttttgttttaggaattggcccttttagttattctagcaactggaaaaatttgtaaagatttcttttttagagcttcatgtgaaagtcattatgcaaaaagtataatcttgtagaagaaatttctagggcattaattgtttttcttgtgtgtgtgtgtgtgtgaagacataatctttaaatacgaagtatagaattttttttagaatatcgtgaaccaaaagtaccagtctattaaagtagtattcaggcatattcctttaattttttttttttttcagtagcagccaagggacttcttggactaatcatcagaataaagatacaatatgctcttaaaccctaaaattcaaactaaaaaaagaaaacagccttgtagagaagaaatttaatcattggatctactatagaatttttaaaaagcatttaccatctaggttctatcagaaaagataagcttttatttggacaatggcaggatcctagagcagtagttcctagctttgacaacacattaagatcacctacagagcttttaaaagaggcccacccagaccagttacatcagaatctctggaggggagggagtatcagtatcttttacaggttccctaggcgattttcgtgggcatccaagttgagaaccactgctatacagcaaacttaaaaaaaaatgttttttaagccatcttttttacataacagaccatgaaaaggataaagcccacatactgaaccaaatgcgagttttaacagtagattctaagtagaaaattggcttaccaagcagctgaaaacaaaacaaaacaaaggaaacatagaaataagctctctgtgactgaattatgtgattttcagaggasaaacatttttaaattattttatggatattagaaaactgctggtctaatttcacaccacagaactctaaacaacagtccacacatatattttagacgtagtctcgctctgtcaccaggctggagtccagtggcgcaatctcagctcactgcaatctccgcctcccaggttcaagtgattatcctgccccagcctcccaagtagctgagactacaggcatgcaccaccacgcccagctagtttttgtatttttagtagagacagggtttcaacatgttggccaggatggtctcgatctcttgacctcatgatctgcccgcctcggcctcccaaagtgctgggattacaggcrtgagccaccacgcccagcccaacagtccatatcttaattagaagaacagaacagagagaattatgtagtctaagaaaaaattcttttgaaaaatatacagtaaatagtacagaaaaaaattttgtcagtaaattcatttaaaaatattaatatattttaatgttctctatgtagatcatcacatataacatggtagttgttttcatttgaatttccacatactctttcttttatttttcaacttattttagaattgggaggtacttgtgcaggcttgttaacaaaggtatattgcaggttgctgtggtttggggtatgatcgaaaccatcacccaggtagtgagcatagtacccagtaggtagttttttagtccttgtcctcctccctctctccctgctctactattagtccccactgtatattgtttccctctttatgtccgtgtatacccagtgtttagctcccacttataagagagaactgttgtatttacctttctgttcctgcattaattcacttagtggcctccagctgtatccctgttgctagaaaggacatacttttgttcttttttatggctgcatagtatttcatggtgtgtgtgtgtgtgtgtgtgtgtgtgtgtgtgtgtgtgtgtgtgtataacattttctttatccagtccaccattcgatgggcacctgggtggattccatgtttttgctattgtgaatagcactgcagtgaatttacaggtgcacacgtccttttggtagaatgatttattttcttttcagtgtatacccagtaataggatggctaggtcgaatggtagttcaactcttagttctttgagaaatttccagactgcactccacagtggctggactaatttacatacccaccaacagtgtgtaagtatccctttttttctgcagcgtcaccaatttctgttattttttgacttttaacaaaagccattctgactggtgtgagatggtatctcattttggttttgatttgcatttctctgatgattagtgattatgagcattctttcatatgtttgttggcgatttgtatgtcttcttttgagaaattcatgtcctttgcccgctttttatagaggttatttgttttttgcttcttgatttgtttatgttccttatagatcctatgtattagacctttgttggatgcacagtttacaaatattttctctcattctgtaggttgtctgtttactctctttatagtgtttcttgctgtgtagaagctctttagtttaattaggcccctcttaatttgtgtttttcttgtatttgcttttgaggactttaccataaattctttgctaagactgatattgagaagggtgtttcctaggtttccttgtaggatatttatagtttgaggtcttacctttaagttttttaagtgaattaatttttgtttaatttaatcgtgaattaatttttgtttatgctgataggaggggttccagtttcattcttctgcacatgaatagccagctatcctaacactatttattgaatagggagtgttttccccattgcttatttttgtcaagtttgttgaagaacaagatggttgtaggtgtgtgactttttttctgggttctctattctgttccatctctaggttgctttgggcattatggccattttaacaagaatgattcttccaatctctgagcatggaatgtttttccatttatttgtgttgtctctgatttctttcagcagtatttcgtagttcttattgcagagatcttttacctcccttgttagctgtcttcttaggcattttattctttttgtggctattgtgaatgggattgcaatcttgatttggacattactggtgtagaaaaatcttgcgtgattaccctggcaaggacttccagtactatattgaacaggagtggtgagagtaggcatccttgtcttgttccagttttcaaggagaatgctcccaacttttgctcattcagtatgatgttggctgtgggtttgaaatagatggcttttattatgttgaggtatgttccttcgataccgagtttgttgggtgttgtgaaaggatgttggattgtattgaaagccttttctgcatctattgaggtaatcatgtggttttgtctttagttctgtttatgtgacaaatcacatttatcgatttgtgtatgttgaaccaaccttgcatcccagggataaaacctacttgattgtggtgaattaactttttgatgtrctgctggatttggttttctagtgttttgttgaggatttttgcatctgtgttcatcagggatattggcctgaagttttctttttttgttgtgtctctgccagattttggtatcaggatgatgctggcttcgtagaatgagttagggaggagtccctcctcctcaatttttttttttttttggaatagtttcaataggattggtaccagttcttctttttacgtctggtagaattcggctgtgaatccatctggtccaaggctttttttggttggtaggatttttattactgattcaatttyggaacacattattggtctgttcaggttttcactttctttctggttcaatcttgaggggttgtgtgtttccaggaatgtatctatttcctacagattttctaagttttatgcatggtgatgttcataatagtctctaaggatcttttgcattcctctgggatcagttgtaatgtcatctttgtcatttctgattctgcttatttggatcttctttctttttgtcttattaatctagctagcactctattaatcttgtttattctctcagaaaacaacttttggtctcattgatcttttgtatggatttttgtgtttcaattttgttctgttctctgattttggctttcttttctactgctacctttggggttcatttgttatttttttactagttcctctaggtgcaatgttagattgttaatttgagagctttctaacttcgtgatgtaggcatttactgcgggaaattttcctsttaacattcctttcacccagagattttgtatgttgtgtctctgttttcgttgatttcaaaaaattttaaaatttctgccttaatttcattgtttactcaaaagtcattcaggagtaagttgtttaatttccatgtaattttgtggttttgggagaacttttggtattgatttctatttttattgcaatgtagtccaagtgtatagttggtatgattttgatttttaaaaaaatttattgatacttgctttatggctaaggaggttgtcagtttttcagtgtgtcccttgtgcagatgagaagaatgtatgttctgtggttgttgggtggagtattctcttatatgtctatcaggtccaattggtcaagtgttgcaatttagtccagaacttcatttttaattttctgccttgatgatctgtcacatgctatcagtgggttgttgaagtctctctattattgtgcggctaagtctttcacataggtcaagaagaatttgttttatgaatgtgggtgctccagtgttggatgcatatatatttaggatagttagatcatcttgttgaatcgaacctttttttattattattatgtaatacccttctttgtccttctygactattgttaaagtctgttttatctgatgtaagaatagtggccccggctcttttttgatttctgtttgcatgatagatctttctccatagtttctttcccctttcatagatctttctccttaatttgagcttgtgggtgttgttaaatgtgaattggctctcttaaagacaataaacacttggaccttgtctttttattcaacttgcaactccatgccttttaagtgggatgtcaggaccatttacattcaaagttaatactgatatgtgagattttgatgctgtcattgtrttactagctggttgttttgtagatgatgtttagttgcttttgatgtgtagttgctttatagtatttgtgggctatgtgcttacttgtgtttttgtggtagcaggtattgttcttttgtttctatgtttagcactcccttaaggacctcttgtaaggctggtgtactggtaatgaattcccttagcattacttgtttgaaaaggattttatttcttcttcacttatgaagcttagtttggtgagatatgaaattcttggttggaatttcttttctttaaagttgctgaaaataggcccctaacctatttcttctgccatttgttttgttttgtttttttttgagacagagtctcactctgtcacctaggctggagtgcagtgatgtgatcttggctcactgcaacctccgcttaaactgggttcaagcgattcccctgcctcagactcctgagtagctgggactacaggtgtgcgccaccacgcccagctaatttttgtaatttttagtagaaatggggtttcaccatattggccaggctggtctcgaactcctgacctcatgatccgcctgcctcggcctcccaagagtgctgggattacaggcgtgagccaccatgcccggcctcctcttttgccttttaagtttctgctgagaggtctgttgctagcctgacgtagttccctttgtaagtgacctgacccttctgtctagsccccattaagattttttctttgatgttgactttgggcaatctgaagagtatgtgccttggggatggttgtcttttatagtatcttgcatgggttctctgtatttcttgaatttgcatatcagtctctctagggagattgggaatgttttcttggactgtattctcaaatatgttttccaagttgcttactctctcttcttccctctgagaaatgccagtgagtcataggtttgatttctttacataatcccatattttgtagaggttttactcatttttaaaaattcttttaaaaattrtttgtcttactgagttgatttgaactggtctttgagttctgagattcttttcctagtttagtctattatgttgttaatgcttccaattgtattttgaaattcttgtagtgaatttttcagtttcagaagtttagtttggttgtttcttaaaatggctgttttatctttctactcttgaatcattttactggattcactgggttctattgggtttcaactttctgctgaatcttgatgagcttcattgccacccagattctgaattctatgtctgccatttctgttgcttcaatctggtaaagaactgttgctagggagctagtgtacttgtttggaggtagggggacactctgacttttgaatcaccaaagttcttgtgcggatcctttctcatctgagcrggctggtattgtctttttggatttgctgtcgttgaatggggctttttgtttttatataatttatttcccttgagtttttaactgtggttcaagttgagtatagtcaataggctttgtttctggatgctttcagaaggccaagtgtctgcacaggatcttcatgtgtggctagattcttgctctcggtttcacaagctatgtatamtggaagagtattttttgtgttgtaatttaggctgcaatccagtagatggcgcttaagagtaatgactggcagataagttcttagccacgtggctcttgtatttcagcacattcgcagcatctctctgtggtgtagggggaaagataagcccctcgccagatccattcccgggccttggggatccccctccgatcactcgcaycgcgcccaatacctttgttaggtattctaggcctcaggctttcttagataggggctgtggctggcagacaggctatacccttcccagataaccctgtggagggaggcatgccccaggcccacaccagcccacgaatacccatgtttcactcttctgagtgttctgaaagtgggagctcttcccccgcttacatgctggccacagatctcagcttggctcccctgagctgtgtgctgtaaccctgggggattgggactgggcctgcagcttcgctctctggcccctggtttgggtaccggccatattggggcagtcaaagtgctccaaggccaccagcaaagcactcaggctgggcagtggaggctgtgctatgtacacactcttgcaggagtggccaagcggggccttgggaggggctggtggacaacgagggtgtgaagaacagtcatgcctcagtcttatgagaaagacagtcctcttctctcctggctcagtggtcagttgggggatagaactacctggaggaaaatggagaacctatgaccacattttgctgcagctgccccacttacaagggctgacgcacaccccctcycccacccccgcccccaacacacaccgcgcgcctccctgggctccatgctggctgaagctttgtctctgcttactctctgggcagatacccctgccaattcaaacgtgtatgggggttgtgggatctcttgtagctagaatcccagaggtaagcggcgagagagcgttcccctgccatcacttcactcaccccttccttaggagctgttcagggccaggattgctgtcctggtgctcagcagtcctatgcagggttcctagtttcttccatcttcagcttcgtgtctatatccctctctattgaatgtcagtgttttttctctgaagatctgttccaagtaccttggcttactcaatattttcgtctctctcagtggtagaggtacgtcctggctgtgtctagttggccatcttatccctcattaatctccacatacttttaatatttctttttggaaagttattaccatcctcctagaactagtattttattcatttgctttgtcacctaattcatttgtcaacaaacaccttcagcttgaaccaacttttatcagtaatgtgaaccagtatcaatcacgtgatggcaacttattctgccctttagtrtctaagcaggtactttaacttttcagatgtgtagacttgataatgctttctgagtatggtggtaatttcatgatctcttactcagaacaggtccttgaatttgtttaccaaattaaccaaaaatatataagcagagctattaaaccttaaaatatgttgtcagggaaacataacattatgaaaacaattttcccataagaagaaaaaactaattttccagggatttttcaagagcagtaacttatgggaaagtaataatgtaaccaactattaatgtaatttgtcacaataggcattcagaaggcattataaatgcatccaactgtaaaggcaaaatacttaagaaacctgtcttccccaaaaatgcatatactgtgttagctttcaaccagtgacaaagatattctgctttagggatggcaatttttaaagaaacctctttattataaaataaagcacacataaaaccacacaaaataaatgcatagtttaatgagctattacaaaggaaacactcctgaaaccaccacccaagtgaggaaatagaactgtgcaggcacccagaagtacctccatgtgctctgtcatgatcttaacctcttccctgtcctccaaagtaactactatcatgactttttatcactttcttgtatacccatatagcttttatcaccgagtgtgcatccccagaaaccatagtttaatattagccacttaagacattttaatgtrtatcttaaatctcttttaatgtagaagtcccccatccatcctttctttttctgtaaaatttgtctgttgaaactgtagtgtcccacagtctggattttattgcttgcatattcatgtttggttcaatatgtttctctgttatttgaaaattcctcaagttagtagtcagttttggcaagactatatgagatggtgtgtctttcgtcaggaggcacataatttcatattttctctcagttctttctcttttttgatgttagcagctattcaatgttcaatgcctagatccattaattcattagggttgcaaaatggtaatattataattatrttatttatttttcattgattacttgggatacttctataaagagacacttccactcaactcctatgtgtttcccaatggttgtacttatatagggtaaacaggacaaatgtctgtttattttctatttaccagtttttgagataatgaattgattctctagtactttctgaaggtgccctgttagcttttgtttttaaaatagcattattaattcatgaattttaatacatttgatttgatggggtcctaaattataattgtaatcctttggaagctcagattgtcccatcttaggccagtgggaggctcttcaggttggctgttctttttgtatggcctcagcagtcttgggtagcttctctgctatctggtgtgatagtatattccttgtttatcttgtatattttctgccccacacctggaattagtcatttctccaagacactgtggtttcctttttaatggaaaatggtattttacgcctgagtcagggtgttagggatattaggctgttgtttttgggttgattattgtttctaggtttcttcagtagaaagagttggagattttatacatatacatattcgtaatgagtccatgccaacacttacaactcaaattcaggactacagagtttttaatttaacctcttctgtattacatttatatctccttctttctgtatcaaaaatcctagtttgtagggacacgggatgaataggaatatcccataatttctcatttactttaacccacagtacacacttaacagtttcaagataatcatgctattactaccactacatgtaatgttctctttcttttaatcttcatctagttgtctgtaggttttgggttttgccctttagtttaactgtctgttttatgtggggacttagagacattaaaaatctgtagtactcctcgtgacaactctccagaattagggatgccgtgtttatggtcatgatgaacacctttagtttgaaccaactttttgtgaaagcttaaggcctgtgtttagattcacatttttgcatgtggatgtccagctgttccaccactatttcttgagaagactatcctttctgcattgaattgcctttgctactttgtcaaatatcagttgattatatttgtgtgggtctatttctgggctttctgttctgttccattgatctatttgcctgtttttttaatgaaataaagtttttaatatattgtgttgactgttataacaactagttctgtggattggaggattttattaatataaacataatttgtaactttcacatgcccaaaagtatgcataagaaaatgcttatacttactagtaaatatgtatgtttttctaaacttttctttttattctggtaagacatttatatatttatcctgtatacaaatgacagatttcaytgaaaacgattacaaataagagaggtatccatttgaaaacaattgctactattttgtttttaattgataatttgaataagtaaagatgtagagcaatagggaactctcattcactattatggtagagtaaatcagtaaactttaatggagagcagtttagcaataggtaatataattgaaggtgagtgtcctacactaagaaaaactggcccatgtgcacaaagaggcatgtacaatagtgttcatagcatcactgtaatagtaaaaatacattagaaacaacttaaatgcctaccaacaggaaaatgaaaacatcttgtggtgaattcagagggtggaatgctctacagcagtttaaatgactgaactagagctatgtgatcatgtgaaatctgaaaaraataagttgagcaaaaaaattacagtatgacaaaatacaataacatttacataaaattttaaaacattcaggataatgctataacacattgttcttgattgatgatgaagtagtagtatgcataggattaaataccaaattcataatagtgttgcatctggggagagaggcaagggaataggatttggcaggccttaactttatctatgatatttctttcattctttttttttttttttgagatggagtttcacttctgttgcccaggctggagtgcaatggtgccgtgtcggctcaccacaacctccgcctcccgggttcaagtgattttgctgcctcagcctcccgaatagctgggattacaggcatgtgccaccatagccggctaatttttctgtttttttttttttttaagtaaagatggggtgtctctatgttggtcaggctggtcccaaactcctgacctcaggtgatctgcccaccttggcctccccaagtgttgggattacaggcgtgagccaccatgcctggccaatatttatttcattaaaagaaatgaagcaaaaggatagtatttcatgaaactggttttcacatttatcatattattctgattttatgtgttttgaatgcatcatggtaaaaaagtaaaaataaagtgtaccttttaaaaaagtaaaaataaagtgtaccttttaaaaaagtaaaaataaagtataccttttatctcctgtttctaaaaatttccacaaagtaaggagggaaatagatttcagaaaaaaattctgctgataagctaagaacttttggttgctgcataatattttaaatgattgtaatagcaaaaaatatgtaatagcaaaaaataatcgaaacattaaatgtttacctacaggaaaatgaaacatcttggttacttactggcacttactggtgaaagttttcagttccagaaaaggccactctttaagtaattttttttcctgatttatatatcaggtgaccttaaaaggattataatagatatattccatacctgaaacatgaaacatgaggatcttaagcctatctctgactattgtttttctgctttttgtgttttcctgattttaaatatcttccagagattggcgtcaatcatgttgactgattatttttcttccatctttgatggcatttggatcaattctaactacatttttcaaatgtagctttttaaaaatgaaaatgaatcatttcagtgatgcatttttcagcaggtttcaaccttaaataagacaatgtatgactgatttatagttggctgaaacaatcactttaagatacacttaaggggccgggcgcagtggctcacacctgtaatcccagcactttgggaggccaaggccagtggatcatgaggtcaggagttcaagaccagcctggccaagatgatgaaaccccgtctttactaaaaatacaaaaattagctgggcatggtggtgggtgcctgtaatcccagctactcgggaggctgaggcagagaattgcttgaacccgggaggtggaggttgcagtgagccaagatcacagcactgcaccccaacctgggtgacacagtgagactccatctcaaaaaacaaaaacaaaaacaaaagatacactgaaggataaactactaccttgttcatctttgaaattgggaaatcccaggacttttagggactctttatcttttctactctttgttagtttgaatttttcagttctcaccatttctttctttaccacacagttttctttaaaagcaaaaaaacaaacaagaaaaacaaaacactggacgctggccatccgtttcttgtgtaacagtcttccctccctggccatttttaatactgcgtagcctgtggtttagctaacwcactgcctgtgtttctgtgcttttcttctttgtcctaccctattgccttagaattaaaacagagatattttcctttagatttttagactttcatcagacttttcacctcataaaagttttttcttcttcctttaattatctatactgtttttccccttcttaytgtttgccttttcaccatgcctttgttagaactttttaccctgttcgttatcacaggcattctcttttgaattctaatgaccagttcctgaaatccccracatgtattttaagactctttagttattagatttcagaattcaccaagtctaggaagtacctgaagacaggattaagaccaagaacccagtaagtgaaggaattcttgatcatgaggtttgttgataacaataagcatgcctcatggaagatgggagtagacttcaaattaatcttgatagattacactaatgtcaccaaccactatcctatctttttggattcttctttctcctttgtgcttttgttcagatcgttgtcatttagcatttctcccttcattacacaccatatatttcgttcttttttcttagcatcatatcttggacttggtcatctcttgactagtaattcaacctaagctgattttsggagaaaaaccagctgcatgaatataagatgagagatgtcttagtatggacaagtttggatttttaaaagtctggttttttctaggtattttcaataactacataattctatttgatgttttcaccttcttatttgcaaggatctgctaacagaaagtcttatagctaggaaatatattcacatatttttgtctttatatagttctttagtcaacagagtatactctaataactttaaagctgctaaaatgcaggtatttgcactttatcatcttggtctatcacattagcattttcctagaagaactgaatgaattttcttctattgattgccatattttatctgagcccatttttattgatgattgtccatttctccctactttttaaatacaaaatgtcttatttcaaaattttaattgaaattccaatctactttttctttcaattaaaaatattactataatttaatatataaatatatattaatattaatataatttaatataatataatttgatgtcatttcagtcttcttgatcaacttaaacttttgcaccaagggtctgtgctgtgtgaatcaaattatttataaacatttccctgtgcagatttattatctctatatgcttattcttgtttcttgtttattatagtacatgatacctttatcatagcagtatacaaatttattattttcatagacattattttcattatttcatagacatagaaacagaaatatttcattctaataatattggttatctttaaaaatcacattgttaagtatgaataaaaataaatttaaaattatgaaattaaagatgaaatgtatattttatttgaaatgtattccatcaatagtgttttattgagctactaccatatgccaactacagggttaaatttcataaatcaattaaatgagtttaatattaacttccaagctacatccttactatgtttaaaacagtttgcactatataaatatcagccataaattctaaataaccaaatatggattttatttagtgtctgtgtttttcattctttttttgtttcattctgctmttcttgccaaataatccagggctttctcattagaaacaacaataatagccgctatttactcagtgctcctgtcccctgcatttagttacattatttttaatttgtgcagcaatcttgtaacacaagtgaataaatccttattttagagatgagaaaacttcagttctaagagatgatcttgctcaagatcccagcattctctattgtcaaaacaaggggtcaggccctgttatttgcctttttaactgtacggtgttgtctgtggctgttatacagggtcaggtccaacttggaattatattctgaacccaagtatttaaaatactttaaacataaaagtattttgggccaggtgtggtggcctacacctgtaatcccagcactttgggaggccaaggtgggcagatcacgaggtcaggagttcgagaccagcctggcaaacatggtgaaaacccgtctctactaaaaatacaaaaattagctggacgtggtggcggggacctgtaatcccagctactcgggaggctgaggcatgagaatcgtttgaaccagggaggtggaggttgcagtgagctgagattgtgccattgcactccagcctgggcaacagggcgagactccgtctcaaaaaaaaaaaaaagtatttttggtgttaatgctaatrtcatatccaagtgtggtggctcgcacctgtaatcccagcactttgggaggttgaggcaggtggatcacttgaggtcaagagttcgagaccagctgggccaacatggcgaaaccctgtctctattaaaaatacaaaaattagctgggtgtggtggtgtgcacctgtaatcgcagctactcgggaggctgaggcaggagaatcacttgaacccgggaggcggaggttgcagtgaatggaaattgcaccactgcactccagtctgggtgacagagcgagactctgtttcaaaagaaaaaaaaaaaaggaaaaaaaagatttcatgcaacagcataggacgaacttagttttcctttttatcttctatataaacagatgcaaaactagcaataatgttttgtatttgtataatttttgttttgaggagataatttagtttttatttggttcattttaggaatttttttcatttacatttacaaagcattatctttatttttagtacaaatcaatcaataaaagaatgaagcatctttatgagaagtcagcttattaagaacttccccttccaaactttttcaaccattcagagcaaagttacctatattattagctactggacaaaaagcacaagcttctttcttttccaccccaaagttaacaggctctactatcatttgccctcttttcagtcccttcacctttttctcactcttctttcttctgtgggggctccctcagcctcacttaaggttcccagtgccctgtggttcccatttcctctctctgattgtataaaggaaaagctgatacagtcatgtaaacttattagttacctatgcttgacaacatgcagcatgtcttgcagagatcttagtttttagagtcagacagacctggattcaaactgcaactctatcacttattagtgggaccaggtgcaatttataccatctctgaccctcactttccttatctttagaatgcagattataatacctaactttggggtattgaaaatgttaaataagacaatgcatgaaaagtcaaacagtatcctrttttcttgcttactactattattattggtgaggttactctttacggaaacttatgcacattcaagtattttcctttgtttttttatagacagtcttgctttgtcacccagcctggaatgcagtggcatgatactagctcactgtagcctcaaactcctgtgctcamgtgatcctcccacctcagcctcctgagtagctaggattataggtacgtgccaccgtgcctggctaattttttaatttttttgtagagacgaggtcttgctaagttgcccaggtgggtctcaaacccttgggctcaagtaatcctcccgccttggcattacaaagcactgggattatactaaagtatttttttaatctttaaacttttatggtatctttaattatgctgtgcaagacattttccacccttaaatgagtgttagccatctatcattacgtggacagttagttgagaagacagcaagtgatcctctggccttgactggcttttaagagtaatctaggattggcagctggggaaagggggtacataagtccatggtcttactcctctttttattattttcccataacttattggggtaaaggtggtatttggttatatgagtaagttctttagtgatgatttgggagattttggtgcacccatcacccaagcagtatacactgcaccatatttgtagtcttttatcgcttctccccttccactccttcctccaagtccccacagtcctttgtatcattcttaggcctttgcatctttataacttagctyccacatatcagtgagaacataagatttttggttttccattcttgagttgcttcacttagaataatagtctccaatctcatccaggycactgcaaatactgttaattcattcctttttatggctgtgtagtattccatcatatgtatatatgtgtgtgtgtatatatatgtgtgtgtgtgtgtgtgtgtgtgtatatgtgtgtgtatatatatatcacagtttctttatccacttgttgattgatgggcatttggatttgttccacgattttgcaattgtgaattgtgctatgcaagtatcttcttaatataatgactttttttcctctgggtagatacccagtagtgggattgccggatcaaatggtagttctacttttagttctttaaggaatctccacactgttttccatagtggctgtactagtttacrttcccaacagcagcatagaagtgttctctgatcactgcatccatgccaacatctactgtttttttatgttttgattatggccattcttgaaggagtaaagtggtattgcactgtggttttgatttgcatttccctgatcattagtgatgtkgagcattttttcatatgtttgttggccatttctgtatcttcttttgagaattgtccattcctgtccttagcccactttttttatgggatttttttttttcttattgatttgtttgaggtcgttgtagattctagatattaatcctttgtcagatgtacagattgtgaagattttctcccactgggttgtctgtttactctgctgactgttccttttgttctttgcaaaagctctttagtttaattaagtcccagctatttatctttgtttttktttgtttgtttgtttgtttgttttttgagacagagtctcactctgtagcccaggctggatcttggctcactgcaacctccacctcccaggttcacaccattctcctgcctcagcctcctgagtagctgggactacaggctcccgccaccacacctggctaatttttttgtatttttagtagagatgggatttcaccatgttagccaggatggtctcgatctcctgacctcatgatccgctcgtctcggcctcccaaagtgctgggattacaagtgtgagccaccatgcccggccttatctttgtttttattgcatttgacttcgggttcttggtcatgaaatccttgcctaagccaatgtccagagggatttttccaatgttatcttctagaatttttatagtttcaagttttaggtttaagtccttcatccatcttgagttgatttttgtacaaggtgagagatgaggatccagtttcattcttctacatgtggctagccaattatcctagcatcatttgttgaatagggtgtccttttcccactgtatgtttttgtatgctttgtcgaagatcagttggctgtaagtatttgggtttatttctggattctttattctgttccattggcctgtgtgcatatttttataccagtaccatgctcttttggtgactatggccttatagtatagtttgaaatcaggtagtgtgatgcctccagatttgttctttttgcttaatcttgctttggctatgtgggctcttttttggttccatatgaattttagaattgtttttctaattccatgaagaatgatggtggtattttgatggggattggattgaatttgtagattgcttttggcagtatggtcattttcacaacattgattctacccatcgatgagcatgggatgtgtttccatttgtttgtgtcatctatgatttctttcagcagtgttttataattttcctcgtagagatctttcgactccttggttaggtatattcctaagcatttttttttttgcagctattataaaaggggttgagttcttgatttgattctctgcttggatgctgttgtatagaactactgatttgtgtacattaatcttgtatacagaaactttgctgaattcttttatcagttctaggagctttctggaggagtacttacagttttcaaggtaaacaatcatgttgtcagcaaacagtgacagtttgacttcctctttaccaatttggttgctctttatttctttctcttgtctgactgctctggctaggacttctagtactgtgttgaagaggagtggtgagagtgggcatccttgtcttgttccagttttcagagggaatactttcaacttttccccattcagtattatgttggctgtgggactgtcatagatggaatttattacattgagatatgtcccttgtgtgccaattttgctaagagttttaatcataaaggggtgctggattttgtcaaatgctttttctgtatctattgagatgatcatgtgatttttgtttttaattctgtttatgtggtatatcacatttattgacttgcgtatgttaaaccatccctgcatccctggtatgaaacccacttgatcatggtggattaccttttcgatatgctattggattcagttagctattattttgttaaggagtttagcatcaatgttcatcaaggatatcggtctgtagttttcttttttggttatgtcctttcctggttttggtattagggtgatgccggcttcatagaatgaagtagggaaggttgttcctttctctatcttgtggagtagtatcaaaaggattggtaccaattcttctttgaatgtccgttagaattctgctgtgaatccgtctgatcctggacatttttttgttggtaatttttaaattaccgtttcaatctcactgcttgttattggtctgttcagggtatctaattcttcctgacttaagctagaagggttgtatttttccaggaatttttccctctattctaggttttctagtttatgtgtgtaaaggtgttcacagtagccttgaatgatcttttgtatttcagtggtgtcagttgtaatgtctcctttttcgtttattagtgaggttatttggattttctctcttcttttcttggttaatcttgctaatggtctatcacttttattgatcttttcaaagcaccagctttttgttgcatttatcttttgtatttttgtttgtttcaatttcatttagttctgctctgatcttgrttatttcctttcttctgctgggtttgggtttggtttgttcttgtttctgtaattccttgaagtgaccttagaatgtcagtttctgctctttcagtctttttgatgtaggtgtttagggctatgaactttcctcttagcaccacctttgctgtatcccagaggtttttgtaggttgtgtcattgttgttcagttcgaagaattttttaaatttccatcttgactttgtttttgacccagtgcttattcaggagcaggttattaaatttccatgtatttgcaaggttttgaaggttccttttggagttaattttagttttgttctactgtggtctaagagagtgtttgatatttcaattttcttcaatttattgaggttcattttatggactatcatgtggtttatcttggagaaggttccatgtgctgttgaatagaatgtgtattctgtggttgttggatgaaatgttctgtatgttaagtccatttgttccaaggtatagtttaaatccattttttctttgttcactttctgtcttgatgacctgtctagtgctgttagtggagtattgaagtccccctctattattgtgttgctatctatctcatttgttaggtcaattagtaattgttttataaatttgagagctccagtgttaggtgcatatatatttaggactgtgatattttcctgttgggcaaggtcttttaccattatatagtgtccctctttgtctcttttaactgctgttgctttaaagtttattttgtctgatataagaatagctacccctactcacctttggtgtccatttgcatgaaatgcctttttccatccctttacttgaagtttatgtgagtccttatgtgttaagtgagtctcctgaaggcatcaggtagttggtaggtgagttcttacccattctgtagttctgtatgttttaagtggagcatttaggccgtttacattcaatgttagtactgaaatgtgaggcacccttgcattcacagtgctatttgttgcctgtgtacttttggttttttgtttattgttttgctttataagttgtatttttgttttataggtcccgtgtcatttatgctttaaaggtgttctgttttgatgtgtttccaggatttgtttcaagatttagagctccttttagcagttcttgtagtggttgcttggtagtggcaaattctcttagcatttgtttgtctgaaaaagactgtatctttcattcacatatgatacttagtttcaatggatacaaaattcttgactgataattgttttgttcaaggaggctgaagataggagcccaataccttctagcttgtagggtttctgctgagaaatctgctgttaatctgataggttttcctttttaggttaccasgtgcttctgtctcacagctcttaaaattctttcctttgtcttaacctgatgacaatgtgcctaagcaatgatctttttgcgatgaatttcccagatgttttctgtgcttcttgtatttggatgtctctagcaaggctgggaaagttttccttgattattctcccaattwtgttttccaaacttttcaaattctcttcttcctcaggaacaccaattattcttaggtttggtcatttaacgtgatcccagacttcttggaggttttgttcatattttcttattcttttttctttgcctttgttggaagactttgtcttccagctctgaatttctttcttctacttgttaatgctatcgctgatactttccacagcattttgcatttctataagtgtttccaatgtttcctgaatttttcactgttttttctttaagctctctatttccttgaatatttctcctttcacttctatcgtttttcgaatttccttgcattaggattcacctttctctggtccctccctgattagctgaataactaacttcctgaattctttttcaggtaaatcagggatttcttcttggtttggatccattgctggcgacctagtgtgatcttttgggggtactaaagagccttgttgtgtcctgttaccagagttggttttctggtttcttctcatttgggtagkctccgtcagacggaaggtctagggttgaaggctgttgttcagattcttttgtccctctgcgtgttctcttgatgtagtactctccccctcttcctatggatgtggcttcctgtgagccaaactgcagtgattgttgtctctcttctgggtctagccacccaggaagtctacctggctctggtctggtactgggggttgtctgcacagagtcctgtgatgtgaaccatctgtgggtctctcagccgtggataccagtgcctgtcctggtggaggtggtgggggatgcagtggactttgtgagggttcttagctttggtggtttaatgctttattttagtggtcgttggcctcctgccgggaggtggcgctttccagagagcatcagctgtggtattatggagagggacctgtggtgagcagggccctagaactcccaagattatatgccctttgtcttccactaccagggtgggtagggaaggaccatcaggtgggagcagggctaggtgtgtctgagctcagactctccttgggtgggtgttgctgtggctgctgtgggggatgggggtgasattcccaggtcactggatttgtgtacctaggaggattatggctgcttctgctgagtcatgcagrttgtcagggaagtcggggagagccggcagtcacaggccttacccagctcccacacaaaccaaagggcctgtctcactctcactgcctcacacaacagtcccaagtctgtttccaggcagtgggcgagccaggcttgaaaacttgccctaggctacctgcctcctagctgtgaaagaaaagggcttgcttctccccctggctgtggagtgtgcatcccggatgtcttgtcctgttcgaattgttacacagttcagctagagatttccttctccctgtggagttttacccgtcttccttctggccaccccctcaatggatccctatggtatcaggttaggaatggcctgcttggggacatagtgagctcccagggcctttctgctacttgcactacccctgtattttgctccactctctaaattgactcacttccagttaaggtcagaaacctctcctacaaacagaccttcagtttctccattctgggggtgtgttcaggagaggaggctctccctttcccactccgcagttggggcactcacagtatttggggtgtctcctgggtcctgcaggagcagtccgcttccttcagagagtctgtggctcttcttgggactgctggtttgttcttgcagtctatctgggctaaaattcacagtgcgagcctccacacactgctctgtctggaggtgcactctagatctgcctcccatccacctccactttttaccccgttttcttcgtgaaactacagagcctattagagagcatctcacaaactttgcaaacaaggaggcctgggatccttttttctggatcatgaacgtaacttgttcaagtccaagactgccatctgtttgggccccttcttttaggctgcccctttgtgagtacaggctctactcgacatgacctggcctctcaatcatctgccctaaggcttcctttgcaaatctttaagctttctggaagtatgatatttcaaccagcattacaattttcttttaattcatagcttaagaaacttcctaccagcacagtttttggctagctgctacacaggtacaaaaaagtgtaaaatatataagacagattatttttttaaagatgccagaagctagaaggaatccaagaaatgaggatacttttggtgtagcatatatgtaagtacggttagttaagtatggttggtaggacaaacagagtgtgtaggtgaagactgtggatttcaggcaaaaaacatgaatgaagttatagagcagggaaaatgtggggcaggttttagtttgaacttggagtaggrgtcctggaggggagactgtaggagataatactggaatttgcaaagcagatcatgtccctcctttgttcagaacttacagcctctcatctgatttagagaaaaaatcaaagtccctagtggcctacaagctatcacacaatatcctccctgtgcctcaattcccatttcccatgactttcttccttgcttccccttctctagctatattagtctccttgatckggccaatagagattccacctcagggcttgtttcctctgcttgaagctctcctttcccacatggctgcatggctcatgcctctttcaggtcacctttatgagagaggtctgtctcgatctctctgtatcacaccccgagccccactccagccactccctattccctgtactttgctttattttacttcatagtgtttaggatatctatatgcttttattattattgcctctgtttttgctattagggtgtgatggtgtgtggaaagtgctacccccaaataacggcatttttggcatactgaatgtttaaagctgaaggaaattgagaaaaccacagaagcagaaaggtccctttgtctttgtcattctctttctctgacatccttccacctttctcccctgaagccatgaaaagaattctctgacctaaaagtagatcataagaccctcatgtgacaagtgtctaccctgtacatggaggaaaggaatgagtacacagagacacagagaaaaatctgaacaaataggacttgctaagttcccctcagtacattaggtcatacctgctttttgtccagtcatacttctatatgactatcaattcttcatcaaacctaagcataaaatagagttttccctggttctttgggtcttcatttctgaaggcacctatgttgcataaaactttggttacataaaatcgttaagcttttctcttattaatctgtcttttgttatagggggtgtcagctatgaaccttgtgataggagggaaatgtattactttttctcctttacaagtgtatgcccctgatcgagaagattttatgcaatgtcatatccctagcccccagaaccagtgcctggcacatggctcatattcaaatatttattggacaaaaaagaaaatgactgcagcaaaaagagtgtgagggagggaaggagttggatatggatcctatggyagtttatgttcaggcaaaggaataaaaatttaacgtattagtcagtgggtagccattgaacggtttgaagagtggagtaaaggcaaaagcatttagtttagggagattaatttggtgataaggtgtaggatggattttttttaagtcacatcaactccccacccctccccaatccagcactctgccacacagctctatgtgcttttttaaaaaatgacttttaatcttgaaatagtttgactcacatgaaattgttaaacagtacagtaaatgctctttctgtactttcccccagtttccccagtgacatcttacattactgcaatacactgtcaaatacaggaaaatgaccttgttactatactgttaactcaggtgcagaccttagatggatttcatcagattttacatgcaccttttctgggggatgtacagttctataaaattttaacgtgtagatatatgttttttaatatttctgggtctgaccttctttaataccactctcctggttcttggactcctgtcatttacatatgaataaagtgaatggcctgtggttttatttgatgttcttctgcattgtgttccatgttggtagatagcctttcctttctataccaaagatgcttttaaaattttactccaccaggattgacaaatcatattgcagttgtccctcgatatatgtggatgattggttccaggaccacccccgccaacacacacacacacacacacacacacacacacacacacacacacacacacacactataccaaaatctgcatatacttagccttgtggaactcaagtatatgaaaagtcagtcctctgtttacatagatttcccacatactgggaatactgtattttctatttgcatttggttgaaaaacatccacctataagtggaccctacagttcaaactcatgttgttcaaggaccgactatatatactaggtcttaattttttaatgtttattttaaaactagtacattacattrtttctttctattggtcacttgtctacttagaattcctatatatcctttctgatagtaaaatatttccacaagattgttaacaggtttctaaagttttttcctttgtctacccagccctactaattagaaatatatttctaataagcaatttaccaataatttcagaattgacaarggtggtaggttgaaggagattaactaatcatttaaagtccaactttgtgttggtaagttcttattcattctttttaactttttaagatattctgctaaccatatgatattactaaaagctgactttcttagtttttatgtactgtggaacatatttaaagtgatttacaggccttccaaaacaaattgttaaagttaaaatcttatagtttaattcttgcagctgtgctatatgtatattttttatttttttaagacaggatctcactgtgtcactatatatatttgtatacatgctgtatatgagatagatgtgctatatgtactttatatacttgtatgttgctgatgtttaagatagtaattgattttctttaataggtttctgaataaatatgcagtcctaggtgtgaagttgaagaaaaaccraagtttatctgaatgtacttgatatatttcttaacaggttctgagttctgtccrcacagaatgggacccactggatgttcgctttggcaccaaacagccttatcaggtgttcacagtggagcactccgtaagtgtagacaaagagcccatggctgacagctgcatctatgaatgcattcggaataaaatccagtgtgtgtcagtcaccagaataccactaaagtcaaaggccatcagctgctgcaggaatgttactgaagacaaactgattctgggctgtgaagattcttcgctaattctttatgaaactcaccgtagagtgactctcttagcacagactgaacttttgccttcattaataagctgccacccaagtggtgccattctgctagttggcagcaaccaaggggagttgcaaatttttgatatggctctatcccctattaacatccaactgttggctgaagaccgcttacccagggagactctgcaattcagtaaattatttgatgcctccagcagtcttgttcaaatgcaatggatasctcctcaggttgtttctcagaagggtgaaggtagtgatatctatgatctcctcttcctcaggtttgaaagaggacctttgggtgtgctgttgtttaaactaggtaagtcaaggaaagtgatgagtaagtaaattaaaatgtttaggatagtgacataattaaggcaataaaactattcttagaatgtagatttttctatttatcatcccataaatatgtttgcctttcaaatatccatatagttcccttttgtggatgactttctaactgccaaaggaacactagatattgaataatttgtaaattgcactaattgtcaatcatgatgcttcaaaagccctaatttttacatttgatacgctctaaaataaactacactactaaataattccttaagaaatagacatgtgaatattttagaaggacttactttgtccattgaaaaattctgtgttgtaggaatggaataatttttctataaaaattattttagattattggtgtctgttgcttcccagactggaattgtgtgaagcaagtgttttaaaagaaaagaaagcagatatttagttagaatttgctgaagatacctgtataacttttagtttctcttttggataaaaatattcaaaaggataggtatttttatagatgttgataagttaatagctataaaattatatattaatatagcccatttcaaccaagagaattttttttaacttttatgtaggtttgtgggtacacatgcaggtttgttatataggtaaacgtgtcacgggggtttgctgtacatattatttcatcacacaggtattaagcccagtacccaatagttatcttttctgcttctctccctcctcatatcctcctccctcaagtagaccccagtgtctgtttttttcttctttgtgttcataagtttttatcatttagctcccacttataagtgagaacatgcrgtatttggttttctgtttctgcattagtttgctaaggataatggcgttcagctccgtccaagttcctgcaaaaaacattatcttgttctttttaatggctgtataatattccacagtgtaccacattttctttatccagtctgtgattgatgggcatttaggttgattccatgtctctactattgtgaatggtgctgcaacaaacrtttgtgtgcatgtatctttatggcagaatgatttatattcctctggatatatacccaataatgggattcctaggtcaaatagtagttttgcttttagctctttgaggaattgctatattgctttccacaatgattgaactaatttacactcccccctcacagtgcataagcattcccttttytccacaaccttgccagcatctgttatttttttactttttaataatagccattctttgtggacctgggaggcggagcttgcagtgagccaagatcgtgccactgcactccagcctgggcgacagagcaagactccgtctcaaaaaaaatagccattctgactggtgtgtgatggtatctcattgtggttttggtttgcacttctctaataatcagtgatactgagctttttttcatatgcttcttggctgcatgtatgtcttcttttgagaagtgtctgttcatgtcctttgcccacttttattttatttttatttttattttactttaagttccaggatacatgtgcagaatgtgcaagtttgttacgtaggtatacatgtgccatggtggtttgctacacctatcaacctgtcatctaggttttaagccctgcatgcattaggtatttgtcctaatgctctccctctccttgctccccacccccaacaggcccttgtgtgtgttgttcccctccctgtgtccatgtattctcattgttcaactgtcacttatgaatgagaaaatgtgatgtttggttttcttttcctgtgttagtttgctgaggatgacggcttccagcttcgtccatgtcccggcaaaggacatgatctcattcttttttatggcttcatagtattccatggtgtatatgtaccacattttctttattcagtctattattgatgggcatttggttgggtccatgtctttgctatcttaaatagttgtgtaataaacatgcatgtgtctttatagcagaatgatttatattcctttgggtatatactcagtaatgggattgctgggtaacatggtatttctggttctagatccttgaggaatcaccatactgtcttccacaatggttgaactaatttacatgcccagcagtgtaaaagtgttcctatttctccacagcctcaccagaatctattgttttcttgaccttttttttgagacacagtctcactctgtcacccaggctggagtgcagtggcgtgatctcagctcacggcaacctccacctcctgggttcaagcaattctcctgcttcagccccctgagtagctgggattacaggcatgtgccaccatgcctggctaatttttgtatttttagtagagacagggttttaccatgttgcccaggctggtctcaaaccagcctcaagtggtcttgagctggtctcaaatcctgacctgaagtgatctgcctgcctcagcttcccaaagtgctgggattacaagtgtgagccactgcacctggcctcttgactttgtaaataatcaccattctgactgatgtgagatgtatctcattgtgsttttgatttgcatttctctaatkatcagtgatgatgagctttttttcatatgtttgttggctgcataaatgtcttcttctgagaagtgtctgttcgtatcctttgcccactttttgatggggttgtttgttttgttcttgtaaatttgtttaagttccttgtagattctggatattagacctttgtyagatgggtagattgcaaaacttttctcccattctgtagattgcctgttcactctgatgatagtttctttggctgtgcagaggctctttaatttaattagatcccatttgtcaattttggcttytgttgcaattgcttttggttttttcgtcatgaagtctttgctcatgcctgtgtcctgaatggtattacctaggttttcttctcgggtttttatgattttgggttttacatttaagtcctttatccattttgagttaatttttgtgtaaggtataaggaaggggtcagtttcagttttctgcatatggctagccagttttcccagcaccatttattaaataggggatcctctccccattgcttgtttttgtgtcaggtttgttgaagatcagatagttgtagatgtgtggtgttatttctgaggtgtctyttctttctcttccattggtctatatatcagttttsgtaccagtaccatgctgctatggttactgtagcctttagtatagtttgaagtcaggtagtgtgatgcctccagcgtgttcttttggcttaggattgtcttggctatatgggctcctttttggttccatatgaaatttaaagtaattttttctaaktctgtgaagaatgtcaatggtagttttatgggaatagcattgaatctgtaaattactctggctttgcctactttttaaygggtttgtttttctcttgtaaatttgtttaagttccttatagatgctggatattagacctttgtcagatatacagtttacaaatattttctcccattctgtaggttgtctgtttactctattcatagtttcttttgttgcaattgcttttggcgtccttgtcatgaaatctttgcctattgtccaggatagtattgcctagttgtcttccaggatttctatacttttgggttttatatttaagtctttaatccatttccagttgattttttatgtatcaaccaagagactttaaaataaaatgttattatgatgattcacttgcctattgtagctttgcattactagctgtgcccygaaatatatgatatactttaggtagatttctacaatttaacattcttgagagaacctcacttaggtgtaaaaaataaattttaattaatgtacattatggctatttgaaaacataggtaaatacattttaaaaccctttatggaatttggctctatggtacaaagttagatttttaaagacattgtagtctttgttaaatagctttcaatttactttattttttcatggatctgcttgtctctgaagttgaatacatgaaataaatctagtgaacatgatttgatttacctgaaagatataatacatacaatgtgagacctatgttcttttcacataataaaaatgcagctaaatctattcataatgttaatattgttcaagaaaaaaatgtttggagtctcatttattacgagataatccagttatactttgcctaactacatgtttaacagttgtatgtctccatacacaacactaattaaagtggatgtttgatgttttgcatgtctgttaaaacacacacacatgcatgcactcatgctctctctttctcacatactctgtctctctctcttcccgccccccgcccttcttccyctctctctctctctcaatctctcctttcaccctctaaattacccagttacctgtcaaacagaaggctttctgcccatgtacacctagcttttcttcagccctcccttgtgggcctactcacaacagctttgcaaaaagcacagctttctcttcctatctctagcacatttgcmttcttactaaagtaaacaggctctcagtgtagggatttagagggcttcctgctaattgccagcttgtaaacttaattggactgtctccctgggcactgttcctaaatcaattaggcaatgagttggctgtcacctctttttcccaagaaggtctcttggaagagaattatccaatagaagtcaagcattcaaatgaaaaggtgataacttttgcaactgacatttatcatttaaattttattttcaatatgactcttaagttttatagaatagggaaactgtacagtcttataggctctttaaaagatctaaatgtggaatttccaaggattttttaaagttttgtttctcatttttaatgtataagattaatatttattacraagtatttttcctcggaagagtagattccttgaaatagaagattccaactagcagatttttaaaagaaaacccagtataaagaacagatttttcttatgatctgctactaaatacatccaaaaaaattaatatacttcttgaatttgtcagtgctgattctgggcatccatgtggagttttcatgtataattcaagttactgcatatataaacaggtagttgcatgtgcagttttcccactagggagcatttatgagatttttttttttttcagatgcttgttatgcaagcctttggaaaatttgacatgaaaggtgtagcttacaatttaaaattgtaaagatagatcatggrtcgtagtttaaaatagaatgctttcatatgtaaacgtgacagtgcctaatgccaatatgctaagatttttggagttagactcttagattaggtcagttagtgtaatgttgaaggaacattgctccaaggctagagcttccatttcttaatccttacaatgatcacacaaatgtgttgggcattaaaagtccatcattcttgtcattagaakaattcaaagattatgtcttccttaggaggtaattagaagtgtcattacatggaagccaagaaatgttgttttatagaaagcaatatgtattcagaatctctttatgtggcaataattataacatatttcttcatatatagactgagattaattttaaaaagtggaggccctaattatactattaagatattaaagcttttccattctcaccagtaccttttccaaccttcactgctctccttaaactcacattatcagctccctattcctctcaacagagcatctcaccttttgtcagttcattaagtttatctgcttcttacgackcccccactcaaccacttatcaatatgcacatgaatctttccctctcagttcagtgaaaaagaatcccttcctcttgtccaagactagcgccaccactatttgctctgtggatcccataacattccctttgacacctttactttgtcaccctccccggccccatctatcttggaacagcagcagataaacaggcccaaactacacyataaaaacagactaacaaaactcttccctaaaatggtttcccatctgttgctgatctaatattcaccttcctttcatagccaaactcattgaaataatactgaacattgccttttctctgcttcttcacttctcactcctcagaacactgtgctctggctgtatcttctgcggtgtctcagaactgctcttggaaaagtcaccagtcacttcctacttgataaatacatgtctcttacattgtttgatgacttttcagcatttgatggttgctgwccactcccactttcacagaaccctcatcaaacagccttctatgatcccaaatgcaactttctatcacatttttatgctcttcttctgcctactcatgaaaatgttggggccatccaggcttccatttttagccctcactttgtgcaggtttatactttattttcagttttgttatctgatctctgactccagcccagaccattcctgactccacatccacatattcatctggcttgctgaataacttctcttggatgtacatgtgtgccttagactcattatgtgcagacatgaagtcatcttttttctctccagacctgcttttcctctcgtattcttctttttggtgaatggtacaattattcagatggaacgtccaagtcaaaagtcgttctagaatcctccctcactcctaatgccacatccaattagtgaccaaatcctatcgattcggccttctaaatacagtcaaaacatttcattcaattcagcgtcactgtcattgctttaatgtagaccttctctattttaccatgatcaagcagaggccctgtatctatattcttctgccttccagtcttgtcatcctactccgcagttaatcccctgagtgctatcctagtgatccttctaacagtacagatttggtcatggattctccagcttgaaatacttcatgtcttttgtgggaacatggatggagatggaggctattatacttagcaaacaaatgcaggaacgaaaaccaaataccacatgttcttacttataagtgggagctaaatgctgacaactcatgaacacaaacaaatgaacagcaaacactggggtctacttgagggtggagtttgggaggagggagagaagcagaaaaggtaactattgggtactgaacttaatacctgggtgattaaataatctgttcaacaggcccccatgatatgagtttacctacgtaacaaaccttcacatgtatccccaaacctaaaataaaagttaaaaaaaaaragaaatactttagtggttgataagccctttcctgccacttggtctttatctccccagctgagttgcactagtgtagcttcccagccatggtgtgtgctctcacgctcactccttccatgttggtgatgatagtattccctttgcctaaagtgtccccacaatgccctcatagagtgtgcaaagttaggaaaaggttacatgttcaagtgatgatgttaaacaagaggtaattaaagctaacatcttcactctcatagaatttttaaaatcacaggcaacgtgtgtatgtgtgtgtatgtctgtctgtctctctttctaraaaacaaacagtatgatttttctcttggaaatttggtacaaagcaattttcctcaagagttattttcaaagagttattttaacattatactttacccaagtggtattaggttatttattgctgaaaatgctagacactttgttagatgcctactcatcttaaaattggatctcatatcatttaaaatgaacttttattctagacaggcttctactttcttcaaactagagtgatgatgaattttaaaaatcaagtttattgaggtataatttacataagtaaaatacacacatttaaaatgtacagttaaggccaggcacggtggctaatacctgtaatcccagcactttaggaggccgaggtgggcggatcacctgaggtcaggagtttgagaccagcctgaccaacatggtgaaacctgtctgtactaaaaatacaaaaaaattacctgggtatggtggcacatgcctgtaatcccagctactcagaaggctgagacaggagaaccgtttgaacttgggaggcggaggatgcagtgagccgaaatcgcgccattgcactccagcctgggcagcaagagcaaaactccttctcaaaaaaaaagtacagttcaatgagttttgacaaatgtatataccctcatgattaccaccacaatcataatatagaacatttccgtcatcccaaaaaattctctcaaggcccttttcagttaattcccacctctccggaagctgatgagcattgatacgctttccattattatagattatatttgttcatgtcctttgcagcaacatggatggagctagaggccattatcctaagtgaaatggctgtaaaacaaagtcaaaaactgcacattctcatttataggtgggagctaaacagtgggtacacgtggacatacagagtggcgtaatagacactggagactccaaaaggtgagagagtgggagaggggtgagggatgaaatactgcctattgagtacaatgttcactatttgggtgataggtacagtaaaagcccagacttcatcaatgcaatatgtctatgtaacacaactgcacttgtatccctaaatctataaaaaacattttttagataaaaaaatagattcgatttgccttttctagaatttcatagaaatgggatcatgtagtaggtactcttgtgtcttggtacttttgctcagcattattctgtgacaatcttcaacgttagtatgtatttctgtatttttttgttacattactgagcagtaggtcattatgtcaatacaccacaatttttttaacttttaggttcagaggtacatgtgcaggtttgttttataggtacattgcgtgtcttgggggtttggtgtacagattatttcgtcacccaggtaataagtacagtattcaataggcagtttttcgatccttaccatcctcccacccttcaccctcaactaggccctgttgtctattgttcctttcttagtgtctgtaagtactcaatgtttagctcccacgtataagtgagaaatgtggtgtttggttttctattcctgtgttatttcatttaggataatggcctccagctgcatccatcttgctgcagagcatatcatctcattcttttttatggctatgtagtattccatggtgtatatgtaccacatttcctttatccagtctactgttgatgggtatttggtttgattccaagtctttgctattgtgagtaatgctgtgacaaacatacgtgtgcatgtgtctttatagtagaacaatttatatttctttgagtatatacccagtaatgagattgttgggttgaatggcaattctgtttcaagttctttgaaaaatgcccaaactgctttccaccatgtctgagctaatttacgttcccactagcagtgtataagcatcctcttttctctgcaccctcaccagcatctgttttttttttagcttattaataatagccattctgactggtatgagatggtatctcattgtggttttgatttgcatttctctgataattagtgatgttgagcattttttcatatggttgtaggctgcatgtatgtcttcttttgaaatgtctatgttctttcccaattgttaatggggttgtttgtgttttggttgttcatttgtttaagttccttaagattctggatactaaacctttgtcagatgcataatttgcaaatatcttctcctattctgtaggttgtctgtttactctgttgattgtttctttagtctcatttgtcaatgtttggttttgtcacaactgtttttggcgcctttgtcatgaaatctttgccagggcctgtgcccaaatggtatttcctaggttaccttgcagggttttcatagttttaggttttacatttaagtctttaatccrtctttaattgatttttctgtatggtgtaaagatggggtccagtttcaatcttctgtatatggctagccagttatcccagtacaatatactgaataagaagtcctttccctgcttgtttttgttgactttgtcaagatcatatggttgtaggtgtgtagcattatttctgggctctctattctgtttcattggtctctgtgtctgtttttgtaccagtaccatgctgttttggtcattgcatcattgtggtatagtttgaagttgggtatgttgtgatgcctccagctttgttctttttgtttaggatcgtgttagctattcagactctttttttggttccatatgaattttaaattagtttttcttttttttccccttttttattttatttatttttattatactttaagttctagggtacatgtgcacaacatgcaggtttgataaataggtatacatgtgacatgttggtttactgatcaactagtcatttacattaggtatttctcctaatgctatccctcccctagccccccacccgctgacaggccccagtgtgtgatgttccccttcctgtgtccaagtgttctcattgttcagttcccacctatgagtgagaacatgcagggtttggttttctgtctttgtgatagtttgctgagaatgatggtttccagcttcatccatgtcctggcaaaggacatgaactcatccttttttatggcggcatagtattccatggtgtatatgtgccacattttcttaatccagtctatcactgatggacattgggttggttccaaatctttgctattgtgaatagtgccgcaataaacatgtgtgcatgtgtctttatagtagcatgatttataatcctttgggtatatacccagtaatggaattgcttggtcaaatggtatttctagttctagatccttgaggaatcgccacactgtcttacacaatggttgaaccagtttacagtcccaccaacagtgtaaaagtgttcctatttctccacatcctccacagcatctgttgttttcctgactttttaatgatcgccattataactggcgtgagatggtatctcattgtggttttgatttgcatttctctgatgaccagtgatgatgagcattttttcatgtgtctattggctgcatagatgtctgcttttgaaaagtgtctgttcatatgctttgcccactttttgatggggttgtttgtttttttcttgtaaatttatttgagttctttgtagattcttgatattagccctttgtcagatgggtagattgcaaaaattttctcccattctgtaggttgcctgttcactctaatggtagtttcttttgctgtgcagaagctctttagtttaattagatcccatttgtcaattttggcttttgttgccattgcttttggtattttagacatgaagtccttgcctatgcctatgtcctgaatggtattgcctaggttttcttctaggggttttatggttttaggcctaacatttaaatctttgatccatcttgaattaacttttgtataaggtgtaaggaagggatccagtttcagttttctacctatggctagccagttttcccagcaccatttattaaatagggaatcctttccccattgcttgtttttgtcaggtttgtcaaagatcagatggttgtagatgtgtggtgttatttccaaggcctctgttctgttccattggtctatatctctgttttggtaccagtaccatgctgttttggttactgtagccttgtagtatagtttgaagtcaggtagtgtgatgcctccagctttgttctttttgcttaggattgtcttggcaatgcaagctcttttttggttccatatgaactttaaagtagttttttccaattctgtgaagaaagtcattggtagcttgatggggatggcattgaatctataaattaccttgggcagtatggccattttcacgatattgattcttcctatccatgagcatggaatgttcttccatttgtttgtgtcctcttttatttccttgagcagtggtttctagttctccttgaagaggtccttcacatcccttgtaagtttgattcctagatattttcttctctttgtagcagttttgaatgggaggtcactcctgatttggctctctgtctattattgatgtataggaatgcttgtgatttttgcacattgattttgtatcctgagactttgctgacattgcttatcagcttaagaagattttgagctgagatgatggggttttctaaatgtacaatcatgtcctctgcaaacagggacaatttgacttcctcttttcctaatggaataccctttatttctttctcttgcctgattgccctagccagaacttccaatatgttgaataggagtggtgagagagggcatccttgtctcgtgccggttttcaaagggaatgcttcccgtttttgcccattcagtatgatattggctgtgggtttgtcataaatagctcttattgtttggggatatattccatcaatacctagtttattgagagtttttatcatgaagtgctgttgaattttgttgaaggccttttctgcatctattgagataatcatatggtttttgtcgttggttctgtttatgtgatggattacgtttattgatttgcgtatgtttaatcagccttgcatcccagggatgaagccaacttgatcgtggtggataagcttttttgatgtgctgctggattcggtttgccagtgttttattgaggatttttgcttcgatgttcatcagggatattggtctmaaattctcttttttgtgtgtgtctctgccaggcttttgtatcaggatgatgctggcctcataaaatgagttagggaggattccctctttttctattgattggaatagtttcagaaggaatggtaccaactcctctttgtacctctggtagaatttggctgtgaatccgtctggttctggacaytttttggttggtaggctattaattattgcctcaacttcagagcctgttattggtttattcagagattcaacttctttctgttttagtcttgggagagtgtatatgtccaggaatttatcmatttcttctagattttctagtttatttgcatagaggtgtttatagtattctctgatggtatttctgtaggataggtggtgatatcccctttatcattttttattgcatctatttgattgttctctcttctttattagtcttgctagcggtctatcagttttgttgatctttttgaaaaaccagctcccggattcattgatttttttgaaaggtttttttgtgtctctatctctttcagttctgctctgatcttagttatttcttgccttctgctagcttttgaatgtgtttgctcttgcttctctattcttttaattgtgatgttagggtgtcaattttagatctttgctgctttctcttgagggcatttagtgctgtaaattttctcctacacactgctttaaatgtgtcccagagattttggtacattgtgtctttgttctcgttggtttcaaagaacatctttatttctgccttaatttcattatttacccagtagtcattcaggagcatgttgttcagtttccatatagttgtgcggttttgagtgagtttcttaatcctgagttctaatttgattgcactgtggtctgagagacagtttgttgtgatttctgttcttctacatttgctgaggagtgctttacttctaattatgtcgtcaattttagaataagtgcaatgtggtgctgtgaagaatgtatattctcttgattaggggtagagaattctgtagatgtctattaggtctgcttggtgcagagctgagttcaagtcctggatatccttgttaaccttctrtctcattgatctgttgaatattgacagtgggatgttaaagtctcccattattattgtgtgggagtctaagtctctttgtaggtctctaaggacttgctttatgaatctgggtgctcctgtattgggtgcatatatatttaggatagttagctcttcttgttgaattgatccctttaccattatgtaatggccttctttgtctcttttgatctttgttggtttaaagtctattttatcagaccctaggattgcaacccctgctttttttgctttctatttgcttggtagatcttcttccatccctttattttgagcctatgtgtgtctctgcacgtgagatgggtctcctgaatacagcacagtgatgggtctggactctttttccagtttgtctgtttgtgtcttttaattggggcttttaccccatttacatttaaggttaatattgttatgtgtgaatgtgatcctgtcatgatgttagctggttattttgcctgttaatggatgcagtttcttcatagcatggatggtctttataatttggcatgtttttgcagtggctggtaccagttgttcttttccatgtttagtgcttcctttaggagctcttgtaaggcaggcctggtggtgacaaaatctctcagcatttgtttatctgtaaaggattttatttctttttcacttatgaagcttagtttggctggatatgagattctgggttgaaaattcttttctttaagaatgttgaatatttgcccccaccctcttctggcttgtaatgtttctgcagggagatctgctggtagtctgatgagcttccctttgtgggtaacccaacctttctttgtggcttctgttgacatttttttcttcatttcaaccttggtgaatctgacgattatgtgtcttggggttgctcttcttgaggagtatctttgtggtgtgttctgtatttcttgaacttgaatgttggcctgtcttgctaggttgaggaagttctccttgctaatatcctgaagagtgttttccaacttggttccattctccccatcacttttaggtacacctatcaaacctagatttggtctttttacatagtcccatatttcttggagtctttattcgtttctttttactcttttttctccaaccttgtcttctcgttttatttcattaatttaatcttcaatcaccaataccctttcttccacttgattgaatcggctattgaagcttgtgcatgcatcacaaagttcycgtgccatggttttcagctccatcaggtcatttatgttcttctctacactgtttattctagttagccattcgtctaacttttttcaaggtttttagcttcctcgtgatgggtttgaacatgctcctttagcttggagaagtttgttmttaccaaccttctgaagcctacttctgtcaactcgtcgaagtcattctccgtccagctttgttccacttctggcgaggagctgcgatcctttggaggagaagaggcgctctggtttttagaattttcagcttttctgttctgatttctcctcatctctgtggttttatctacctttggtctttgatgttggtgacctacagatggggttttggtgtagatgccctttttgttgatgttcaattcctttctgttagttagttttccttctaacagtcagatccctcagctgcagggctgttggagtttgctggaggtccactccagaccctgtttgcytgggtatcaccagtcgaggctcagttggaaatgcagaaatcacccgtcttctgtgtcagtcacactgggagatgcagactggagctgttcctattcagccatcttggaacggctctcaaattagtttatttttttttctaattctgtgaagaatgtcattggtagtttgataggaatagcactggatctgtaaattgctttgggcagtaaagtcattttaatgatattgattctacctatccatgagctttgaatgtttttccatttgtttgtgtcatctctgatttctttgagcagtgttttgtaattcctgttgtagagatcttttacctctctgttagctgtattcccaggtgttttattctttttgtggcttttgtgaatgggattgtgttgcttatttggctctcagcttggatgtcgttggtgtatggaaatattactgatttgtatactttagttttgtatcgtgaaactttgctgaaattgtttctcagatctaggagcttttgggcagagactattgggtttccaggtatagaatcatattttctacaaacagagatagtttgacttcatgtcttctatttggatgtgttttatttctttctcttgcctgatggctctggctaggacttccggttctatattgaacaggaatggtgagagagggcatccttgtcttgttccagttttccagcttttgcccattcagtatgatgttggctgtggatttatcataggttactctattattttgatgtatattccttcaatacctagtttgttgaggttttttttcttttttttaacatgaagcgatgttggattttattgaaagccttttctgtgtctattgagacgattgtgtggtttttgtttttcattctgtttatgtgatgaatcacatttagtgatttgtgtatgttgacctaaccttacatctagggataaaacctacttatttgtggtagcttttcattttgatgtgctgctggatttcatttgctagtatttattgaggatttttacatctacgtgtatcaaggatattggccataagtttcctttttttgttgtctctctgccagattttgtatcaggatgatgctggcctcatagaatgagttagggagtccttccttctcatttttttggaatagtttcagtaggaatggtaccagctcttctttatacacgtggtagaatttggctgtgaattgtctggtcctaagctttttctgatggtaggctttttattagtgattcagttttggagcttgttattggtctgttcagggattcagtttcttcctgattcaatcttgacagggtgtacgttcccagaaatttattcatatcttctaggttttctagcttgagtgcatagaggtgttcctaatatcctctgagggtttttttttgtatttctgtgccacagttttttaatcctttcacatattgatggacgtttggtttgtttccagattttcgctaacagattaaaaatgctatgtactttcatctacaagtctttgtatgaacatatatwttcatttctcttgtcaaaaacctacaagtttaaaatggctgggccatatgctaagtgtttgttcaactttagaagaaactgttttctaaaatgattgtgtcatttagcatatcagcaatttatgggaactctagttgctccaagttctaacacttgaaattaatggtcattttaattttagccattctagtaagtgtgttgtggtactaatttgcatttctctggtgactgttggaatcaagcatcttttcatgtgcttatttgttgtatatcttgtctgatgaagtatgtcttcaaatcttttgcccaaatttaattggattttttctttacttattcttgagttgtaagagattttttatgtatattttatgaatacaaggcctttgtaagatacttgtattgtgaatattttctttcagcctgtagtttaccctttcattattttaccattgtttataaagtagcagaagtttttaattttaatgaaattcagttcataatgttctttgttttatggcttttgcttttcacgtcctaagaaaactctttgacgcagggtcacaaggattttcttatagaagttttgtgggtttagctcttacatttaggttgatggtctacttcaagttaattttttgcatatggtatgaggtatgggttgagattaatttttaatataaatatttattgttccagcaccaattgtcagaaagagtattctttctcccattgaattactttgatctatcaataactgtattgtcttttagtgaattaaatgtctgtaccttaagcaagtaccattctgacttgattcctgtggctttacagtaagtggctttacagtaagtcttgaaatcaggtactgttagtccttcaactttattcttctttttcctattattttgactattctagakcctttccatgtctatataagttttgaaactggcttgtttcacctgatgggattttgactgagattgtgttggatctatagatcattttagggaggaatgattcttaacaatattgagtctcctaatccataaaagtagtacccttctccaattatttaggtgttcattagtttctctctgygtagttttataattttaagtgtaaaggtcttgtacatgctttgttatatttatccctaagtattgcatgtttttggattatattgtaratatttttattacaatttttattgttcattgggattatgtagaaataaatttttaaaatattgactatgtatcctgcaatcctgttaagctcattcttagctgaagtaacttggaatccttaggattttctacatagatgaccatgacaactggatttagaagtgttacatcatcttatctaaactgtgtgctttttattttattctcttcacttcttacagctaggacatctggtacaatattaaatagaaatggtaagagaggacatcctttctttgtttccaatcttcggtggaaaacattcaatctttcactataagtatgatggtattatattgaggaagtccctttccattcctagtctgctgagatatattaagtggatgttgaattttttttccaagtgctttttctgcagcaattgaaatgattataggttttttctcttttttctcatcataaggtaaattatattgattggctttcagatgtttaagcaaccttgcatttgtgggagtaatcttgcttgttcatggtatattatctttttaatatattgctggatttgctaatattatgttaagggtttttgtgtttgtttatgggaaatattggtctgtagttttctttttattttcttgtaatatcttcatttttggtgtcagtgtaattctaaccacatgaaatgagttgggaagtattctctcttataatttgagttgtattgaatttatattatttcttcttttgttaattttttttttttacgtattactatttttttttagagacacagtcttgctgtcttgcccaggttggacttaaaactcttgggctcaagcagtcctcccgccttagcctcctgtgagsstgggacaataggtgtatgccactgttcctggctttattatttcttccgttaatgtttgagagaattcaccagtgaagacatcttaacatgcaggtcgtgtttaattatgtgtgtgcattggtgcacgtgtgtgtgtgtgtatgtgtaaaggtttttttaacaatgacttcaaacttaaataatatagagccattcaagtttattccttcttgagtgagctttgatagtttgggtctttcaaggaatccattgcatttaggttatatttgttcatataaaaactaattattcactgattttaaatgtcagtagttctgtagtgatcattcttatattggtaattgtatcatctctctttttttctcagctgagacagaagtttgtcaattttactgatcttctcaaagaacaagctgttgaattcattgatttttctatatttgttatttactatttactgtctttattatttccttccatttactttgggtcttactttaattcaattaaaaatattttctaatatactttgtgacatttttttctttgacccataggttatttagaaggatgttgcttaacttctaaatatttggggattttccagataatttttctgttactgatatttaattctattgtggtcagagaaaatgctcttacgattttaaaacttttaaatgtatgtagcttcattatattactcagaatatgctctatcttggtctgtgttatgtgtgcacttaaaaagaatgtattttactgtggttgggtgcagtgttttataaatgtcaattaggtcaaattcattgatagtgtttttcaagtatttcctatacttactgattttttgcttacatattctcttgattattaaaagtgctgaaatctccaattataattttattgattgattgattgattgagacagagtctcactctgtcacccaggctggagtgcagtggtgtgatcttggttcaacgcaacctccacctcccagatgcaagcgattctcctgctgcagcctcccgagtagctgtgattattggcccctgccatcatgcttggctaatttttgtatttttagtaaagactgttttgccatgtttgccatgcctgtctcgaactcctgacctcaagtgatctgcctgccttggccttccatagtgctcagattactggcatgaaccactgcccctgggcaccaattataattttagatctggctttttctccttttagttctgtcagtttttgctttattatttcacagctctgttattaggtgcatttaaggattgttatctttcttcatgaattttggatcatttttataaaggtatagaattctagattaatttttttacctctcagtacttttaaaatgtcttgttattgttttctggattacataattttagatgcaaaatctgtaatcattcatatctttgcttttttgtacatccagtgtattttttttcctgtggttgccttttaagattttctctttatcacctttcaatgattttattatgattatatgttagcttttcttctcaatagatgagttctttctcttgttactagtagaagtattacatagggtataggtggagtcaacagacttcagatatttttggtttcctgcaaagttcctatgaattaatatctactgccaaggaaccaccctgatttatgaggacttccaatgcctgactgcaggctcatgaaggctgttggacggtcacattctttgattttaccaacacaaaaggaatagtaaagttttactgcttagtatagtcagggcaattccccagattccctatcaagttgagtcctgttaatagcacaagttttcattttgatgtgatttgaagttagtatgaagaattttagcatctttctcatgaactaatacattttttaaaatcctgaagcctataactattccagttaaatgatgatgatgatgatagtaataaaaagaattacagtaatattttatactactttgtggcttaaaagtaatttcacatacattttctcattttctttcatgattatttgtactgagaggaagttttttagactttaatcagtaaacattgaagaaaaaaagattttgtaacctaccattttgaaaagatttaaaaaattacataaaacaagcaaaaaaccttgtttttttttgctagtacttattgtcatttaatacacagaaattattaatttcaaatgaggtcagccatatttaaaagacaataaaaccagaacagaatgccaccccccaatctttgttttatgctcttggtcctaagagtaaaagtgaattttctttcattttaaaaggatcaacagatgtgtttttgttgttatcagtgtatsttatagcaaatattagttgagaaggagatcagtcccacatttctagcacttaatgcaagcaatataggtttttttctttatggaaaaattaactctttttgttattctattttattttaaaagattcacctggttttccatgttttgtgataggcgtcttcactcgaggacagctgggcctgatagacatcatcttccagtacattcactgtgatgagatctatgaggcaataaacatcctgagcagcatgaactgggacactctgggccaccagtgctttatcagcatgagcgccattgtaaaccatcttcttagacagaagctcactccagagagagaaggtcagacttgaaatatttttcatwgatgagttttgtatatacatgaaatagattttattgagttattttttgaggttgtttttgagtcatggtattggagattaaatgataaaaatgttagtgctctattaaaactgaaaggatcagatatcaaataattgctcccatatagtacttactgtatagtatttgtcaacataaagaacagcttttctgtatatgcttatgttggagcttacagtgcagtcattgtacaattcagtctaagctcacagacagaacatgctcagatttcaaactttgatcaaaaatttcatgtactccgtggggtctgctagacaaagggcaccaaacaaaagtctttattcctccctcacattagatatcaatatttttttctcacaccgaagtcctctgtccagacaatagtccttaacacttcctttttttgtatatctgaattgtagcccaggccgctccttcttgttttccttattctgacttatagttgtaacactcttctctcttctgcctgcttggatttccttacctttgcccaataagtaattttgttgatatatatctaagatgtttaattttaaaagagaaggtaaaaaaactaaggtcagggggtggggcagtggggaatgctgtgacacatacaataatgaaataaatctttatatttgccaattatctaatagtattatttttcttataagttatttacttaatgtacaatgcacctaaacattctaamatttgcatctttcatatctttgtggtaagcattgacattaatggtggaaaatcatggtgaatgagaaactgtccctaggtaatttacaagataggaggaacaggaaatatgtcaaaagatctttacttgaagagcttttcttttctactttctttgcatttttatagatttttcttatcccactttattacattgccaaaataaacaagttgtttggatagaattctgtaggtaaccttcattttagtaattttagagaagaataattagtaagtacatgcttttccaggaagtctgtatcgtgggtcttggcccaagtcacacgtggcccacaatacatatttatttaatgttaattaaatgttctttttggaggtagtcaaaatttatctcgggaaattccgatatttttctttttttatttagagacagtctcactctgttgctcaggctggcatgcagtggcatgatctcttctcactgcaatgcctgcctcccaggttcaagcgattctcctgccttagcctcctgagtagctgggattacagatgtgcaccacacacccagctaatttttctatttttagtagagggatttcactatgttgcccaggttggcctcaagtgatctgcctgcctaagcctcccaaagtgctgggattacaggcgtgagcccgtactgcgcctggccaagaaattccagtatttttacaatgagaaaatgcctagtgcatggcccactacttcggtactcaatgagtattagttaaaaataaaaagaagagtataactccataatttttagggtacaaggtactactataatattgctgcctgcagttatcttaactaattatttcttagtattgatatactgtaatgactgagtgtatacttaaaaaaaaaatgaaagaaaaaattttaaaaagcagggtccctaaagaatgcttatgttatacacaatttatataagagatcataaatttacagttaaagaagaaatatgaaaaagataaaatattgaccctcagcacactgaaaaattgctagcaccttagtgaatttgtcttgtaagattactgtgttataggaaagattattagggaatacacaaatgggcattatcagattcttgccttaataaagtatattttcaaggaaccatattggggagatagggaaataaaaagcttgtatgatactaggctattaaaataaaatttttgcatgatgctgggttatcagaatatgtacattttaagtaggtgtgtgcgttttcctccaagtaactacaaaacatatttctaaaacattcacaattttttttctctcttgagacttattctatctgaatctaacaaatttgacgtggtaatttgttttccttttattagtggaacccagtgagctcttttatttgtagccgtattgtagttatctttgagatcttcatttctgccttaaacatcaagctgggctatctaatgaatctacagctgtgctgggagttatgagtattccatgtaggttcgaatatttcagatgtacgaaacatgctgtcaagaaaacaagcaatggcaagagaatctggcttgttttcacaatagcattgctgtattcaattgtaatctaaattgactgctgctttgaaagaaaatacccctaaagttcatcttactttactgtctagatttgagattaaaaaaagaaattactaacagcttagccaagtccatagtaattactctgatgaggtatttaatactttcaaacccaaatatgcctaaaactaaagagttttgctaaataaggaattgtttattcaactcagtgctagtagcataaaaatcagagaagtcttactgtgaactgtagtgttctcgtacatactcttactctcaccattatggtaattacttaacttccaggtatttctgggaaaaaacctagtcccatgagcatgtcttggtaaaattctgaaacaggcaaaatgtgccctttcccccartcttagccctctagtttatcaaaacctgcctctccagtccttgtttcctctcccrgaggtcttagttttcacacttggataaaaccaagacttttgctgtttagggcaggacttagggaagatatagggactttcacggttgtcttaaaattgcaatagagatatatttctactccaatatgcctgtttatttgtattattttaaagaacatttctgctatatcgatttcarttcccaatgaagaaaggtcagttttctccttttagccaaagacagtaaatgtttagcacactgtgagttgattttactggaagtactagttcaaactgtgttactttgatgagtcactgttttaattacccatttgtggtgagaggttggttcattatggatttcttcagttttgacagctttttgttgctcagagtcattgtcagctttgcctcaagtgaaagtttatacacaggtttgtttttgtaccagctgtcatattttaatttyatctttcctgcaacaagttcatgtttcatccaagtctgcaaaacctgactgactgcaaacatgagtattttgttgtaattgaaggagttttcacttgttttagtgctgctatgtttgaattccacagcacagcttgagacaagccttggaaccttctatgctccaacaagaccacttytggattccactatattggaatatagagatcaaatcagcaaatatgcaaggagattcttccatcacttgctcaggtgaatgatatgtttggattgattagcrtcagactaattacttatttcaggagacatcctctttaattaaaatattccatagtaaggctaygtgtttcctaacagtccatctcctcaaagaaatatacatcttcttttggtcttatttaatttgttattgttttcattttaaggaaatatttgaatattatttgggggttttatataaccaatactttttaatataccttcctctttaatatgaaagctatgtaaagtcaatgtagaaatattaactgaattgtgctactcgcactaagtaaatattttctttttaattgaagctaatgatgtgaatgttctgtaaagctctgagacagtcattagtttgtttttctttaagaattactgtagaaaaacttgtccattgtctgcttatataatgtggcaagtttctagcttcaccataccccattttctctgctttaaatgggtataataaattttgttaacctagaaaatatgtgaaaaataatgtcaagaaatttctctaagaaaagtattgcagaagttaaaggaaaaatacaatagcatgtatatatatatatatacatgaagttcagaaagcaggattaatggatggaaagaaggaagatgaatgcatggataatttagggatacatatataaatgtggcagtactataagtaaaagcaagcaaaaaaattagcacacaatttagagcagtctggagtgaatgaaaagaaatatgataaaataagcatataatagcctctaaggtattagtaatgttctgtttcttaasatgagtggtaaatatcagggtatagtaaattattaaataaattattaaattattaaaaataaaaaattatttttaaactgtgtatatatacacatacatatacatatgtatgtctgtgtatgtttgcatatatgtatacatatatgtatagtattcttttatatatgacatgttatacaatggaaagtaacagaattttcaactgtgtaccaaaaaggaggattacatcaaggagttgattttagacttttaattttactaataatataatctgttatagtgcttttcactctttcaagggctttgatgtatattctcttatttttttctcagaaactcctgttaaagtagtagtatcatttgacaagtgagtaaactgaggcatagataagtgkcttgcttagatcaaataacaagttattggtggtgtcacatctttgaactgattttgattccctgttccttactcttcccttaaaaccatttatctattattgattgtatattttttagatcctagcttataaaatacctggaaatttttattcacttaagagtagactgtttggtaactatttttaactgccaaaaagaagggggaaacttcagattggtcaagatttgagaatttgtgttgttgtgtagatattcatgttctatcattagatttttatatataaagtggcattttgaagtctaccaagcagtgaagcctctggaaaacagcaattttagaagctgagaaacattaaaatattgcaagggttatgatatgtaattgaatcttgccttttcatctgaatgacattagcatattccaggactcttcatataaatgaggctgtcttctatgaatgaacacatggtaaaagtgctggggttaatgtcacatttatttggacttagagctttgttctttgctcttattgctaatatttgtttctctgtttctggggaaaattaatgaattctcctcctgcctaaagagcccaaaaaggtgaaagtgaatgaaacagaagttttggaagcctattctttgtgtcctcattgtctctggcctctgagattttatgcagtgatttagttttcacataagcatcatatttgtaaccatcctgctggctctaggatgctctattctactaatgtgaattttttgttcattggtttttctcaaatggttttctaattattttttggacatactttgataaggtcactattattgttatcaaaattattattctccagcttttctatgtggttacatctggaactggatgttttcccttggggcatactagctttttcatgtttcttcttttgcatactttgctactgtttcaattataatgagtgttttattagttcttcttttgatagtaggctatacagtattatgaaaaaagaaacaaaagttttgaagaaattaaatgagatagcttaagttggaaccattcttttgtttaatgtgctaccaagaagttctcatgctcaggggaagagaaacaggccaaatacctttttgtatttgtgaagtgctagaattacattactccctgtcctttggctagtcaatattttaatactctgaaaaaagaaaccatattagacaatggaatatccctaaacagtaaagaccatcatagggaattttaaattaaagatgaggaaaagttgccccacagagattaggggtgtgcctaaaattactcacatggaactcagattgcctgaatctggattggattattttgataaagagtaaaataytacattgattttaatttcatctagcatatgaagggtaaggtcatrgtatgaatttgtgataatagacaagtataccatgtagattattaaaataaatgttttatatacaattttatttttgtcttgagaggagaggaattctatagacattgctttacactttttggtcttttttgtctttaacaaatataaaaaattatctgaaagcctttttccaaatccaaacaaatctaaactttaaaattcacttctmatctttttgtatgcattcaaagtgatcaattttcataaagaaatgctccctagaaatgtaaattaagctcctaacgttaaagataggaaaacagtagaagcacagtcttgatatggtagctaataaagtatttattataataaaattttaaagagatgatagaatctaatttataaaatcattaaactggaagacacttacctacagaaggtaaatgcaactttgcctaaactaagtttaaaaggtaattagtcagctgcctccatgaaattgaatagtcttccacaagtactgaacagggaaatgatggcaaatgagagcttttcatcataaacaaatagaaactatagtaggaacccctaaatattgatgaaatgaaagggcaaacatttcaaatgaatgtgccacatatgaagcttattactaacatggaaatataatgtattataaagagttaataatttatttttaacttttcccccttcttaactgtgagactgttgttttctgactcaaatagtgttatgtgattgtggcacagagagttgtgctttttaaatgcttataaaaatattaagcaaaacttggggaatttgagatttattgcctagaaataaaattttttggttatgaaatattggtggggtaatgtattgatgtctgcattttcctttgtaatgtaacaacaaaaagtaatatgaattgatggaaacagagagataggtaaatatgtgataagcaatattgtaaaacgataaagtcagaatacatgtggtagataatcttttaactttgctctatgttggaaatttttacagtaagatgttgcggataatatactggagtcaatatttacacttagaattcagaaaaaaagggcagtcttttggaaatggcttttagcttatgtaaaatatatatgataggcaaaacaaaaatcattttgtgactaaaacagttcttaagcaattccatgtatacatggctttttcagttatacttttcgctgatagagcatatatagtaaatacaacatttgtatgaaatcattttaaagaacatgaatactaaaaaagttaacctaagaacattcaaggcaacaagatagaatgatttttagagaaaatctcctggtcagatcatccaaaaatgctagataatatattcaaaatatttattgaaagcatggttgagctggcagtaaagtaagggaaacaggctgaaatgataaggatgcttgattccacaagagtaagcaaactcaacgttctcctggagggcatcctctggctcacagtaagataggtgcttggtttacaaaggttgtgtactcagaggataggagacataactgagagctcatgcagaatgggaggttgtatcagacatccatayataaatctagaacccttgaatgggacagcatacttcctgagagaactggaatgaaggaagtcatgagatgcagaaaggaatggtagacaaaaaaaaaaaaaaaatcataaacttgtggaaacctaaacaaaaattgatcatataaagcatatacactaatgtctaattcagggggttaaaaattaaaataaaatcttggacaataacaacatataaatcagaagaggagtgaagagagttaaagcattctaaggtccttatacttttcaagaggaagataaagatattcattctagattttagtaagtgaaatacagaatttctagggtaatcactaaaaggaaagaaatagagtatataattttcaaggaaggagagggaaaatgttggataaagaaaaaaaattaaccccaaagatggcaagaattaggggtaagtggagcatgcaggggaagaaacatgggaaaaaagatggaaaatagaaaacacacaatgagatactagcaatgaatcaaaaactcaataatcattgttaatgtaaaacagatttttttcctcagttttttttttttttttaaagacatctaaaacagagaaggtggctgggtgctttggctcacacctgtaatcccagcatttatgggaggccaaggcaggagaatcgcttcagcccaggaatttgagaccagcacaagcaacacagtgagaccccgtctctacaaaacgttttttaaaaaattagccgggcgcatggtggcacacgcctgtagtcccagctacttggaaggctgggatgggaggattgcttgagcctgggtgttcaagtctgcagtgagccttgttcctgcaattgcactgggcgacagagcaagaccgtatgtcatttaaaagaaaaaaaaaaacaacaaaaaaatgaaaacaaagaaaatttaaatgtcagagaatataaaaaagtttataccagataaatactccaaagagggctaatatagtagtaatgggtttttttgtttttggtttgtttgtttgttttgatatggcgtttcactcttgttgcccaggctggagtgcaatggagttatcttggctcaccgcaacctccgcctcccaggttcaagcgattctcctgcctcatcctccgaggtagctaggattacaggaatgcgccaccatgcccggctaattttgtatttttagtagagacggggtttctccatgttggtcaggctggtctcaaactcccaacctcaggtgattcacccgcctcggcctcccaaagtgctgggattatagaagtgagctaccgtgcccagcctatattggtaatgtaatacaaatagtctttaaagcaaaatcattagtagagattactagagatcaatattgacagaaaaatcaattctctgggaagataaaacaattctaaatgtgtgtaacatagcttcagtgtacacaaaagtccactgtcaatagttaaagaattttaactcctttcatttagtaattgatagattaascaaacaaagtgtcaggaaataggagatttgaacaatactgtataattgaaatcttgatttaatggacatgtgtagagtccaacaagtggagactatacttttttcccatgaataaacatttatataaattgaccatattctaggtaataaaattcatgaaaatgtcaaggagtaatttttatttactccacaattaattactgagtactacatgccaagcacttagctaggaatatggcaaagggcaaaacagaccaaaaaaacagaagtttgtatatttgcccctgcctaaatctcatgttgaaatgtaatccccagtgttggaggtggggcttggtaggaggtatttggatcatgggggtggattatttatggcttgatgctccctgtgatagtgagtttacaaggacagcaccaaaccataaggcatccaccctcatgacccaaatgaccatatttggttggttaaacattggtggctctccctcctcttgctccagttcttgccatgtgagatgctggctccccctttgccttccgccatgagtgaaagctttctgagacctcaccagaagccaagcaattgctagcaccatgctacctgtataggctacagaaccatgagccaattaaacctcttttctttataaatttcccagtgtcaggtatttctttatagcaatgcaagaatggcctaatacaataaataagtgggtaaaatacataatatgtcaggtaatgatacatgccatgaaagagaacatgcagggacagggctaggaagtattagatgatgggtgagtagactgcagttttaaataagattgccagatttcttaaattttaatccttaggtaaattctcttgttctccctcattcatctcatcctagccttagccttggccctggccctggaaaatacaaattgttatgaaaaaggtttttttggaggagtggaggcttgttttacaaaataaagaatcatactattaaaaaaaaaagattgtcagggaaggcctcactaaaaaggcaaaatattagttaaatcccagcagtttggctggagcagtgaatgagaaggagaggaatgagacaatgggtcagagaggcagcaagtggccaggtcatacaggattttgtagattattgtaaggaattgagagtattctcttgaataataggggaactcaatagatgatttgaaactacctagtgaatggataactcagatcctgtgttgagaattgtccttagaaggtcaaggagaaggagacccattgggaggctattgcagtaattgagtaagcgatggtggccagttacagattggtagcaaagggaatgaagatagagtggtggattttgaacatattaaaggttctgacaacaggattttctaacagattggacaaagaatataatagagaagtcaagcatgacttcaagtgttttgacctgagcaattggaaaaacaaaattgttactgacaagattgataagactccagaaagaacaggtatgtgggaaaagaccagragtttggttttggaaatgttgagtttgagtgagaaattcagaagtgagttctgagacagggctatgaagggaaatatatatatttaaaatgtttttcttggaaaagaagaaagactcaaaatttatgagccacgaaatttttaaaacttgcaaaaaatatcagtaaaataaatctgaagaaagaaggaaggaagtttaaaaataaatgtaacaaaaaccaaaattataaaataggattaataaagctaaacatttcttctttgacaagattagtcaaacagaaaaaaaagcaaagggaatacaatgaacaatttatgacaacaaacatgaaaaatggggaaaactgaaaatttcttaggtaaataaaaaccaaaactgactaaaaaagaaatagaagatttaaatagtcctatacacatgaaagaaaatggtaattaatgtttctcctataaagtaaactacagtcccaagatgttttttgcaagtgaggttccattgctatattcgcacaattcttttctatgttgtttttttttagtcctttttatcaaatgcattttttacatagttgtaatcattgaatacatgaaattttaacatctttaaaaaattctaagaagtttgatccattacgatgacattccaagagacttgtactctttggtatggtagttggatttaaaggttgtttaagcctagagtggtctgcacacatctgaacagacccttggttagggaaaggatgaaaaggcaaaaggagaaataagcaggagggaacaatagcaaaacctcaagtcttttaactggaagaacctagaaaaatgtgattttatagatgaagtagctggtttttatgtgggcacagttagggccatttaggaaggaataccatgggtataagggctctttagattcctgccaagggatgagggttcctttaccataatggcaatttgaagaaaagttgttatactaatcagtaaattaggataccaaacaaaattgacataatataggtataaataactcgatggtcattatatgaacaaattttgtataccttgcttttcttccttaaagcccctttcatagctaattgggtgtgtgagtgaggggtgtcgcccaaagcttccatgctgtttttcatctggcagtctggtttcctttaacagcattgcctcctaaatatagcaatagcagtaaaagaagtccttatattttgcttatgttgttcgtattctaaattatgaatggtattttgtctaaaaatcaaatgggtaaaaactgcagtgttaaaaagggaatatcatgattatgtaagaagctaccctaatacccactctgttccatttgcattgctgtgataaccttaacaactctttttttctgttgtgagagaaayagactggattcattgtacagatagaggtaagagtggggatagtctgcttattaggcgtgacattgaacaaatgaatcttaagacttttcttcaccctagacattagttatttttttcatttgggatgtacaaaatgtgttttctgcccaaattctagttgaggtatctgtttggaattgtttattactctcattttcttttgcttgtaactcctcgctgtcttctctggtacttttattcagtgagtgaggacctgggtagaggaccacttttataagagagtgaactgcatctgcagacccaccatactcctgatcaagacagttgttgacctcaaactccagactgtcccctgctgatgacctcatcatgcttcttgtcagcaagcttggctctctttagtttggcaaggattaaaagacatacagtgcctatattcactgtattaagtaactggcctttaaggacatttgattatagtaccagcagaaattagtatgtactggagatggctatagacacttctgttacaaagctacagttgtattaaagctgtgggatgaggacagcctttaccaacatggtcaaaatcaaagatttttttttttctactatgtagtgaagggcatacatagtatgtgcaaactgcagctattaagagagatatgatgatttttggctgtttacattcatgaatactttataaaatccaggaaaaattttgttagatattctactctattgaagtctgaaaagaaacatgcagagaaaatataatcaagaatttatttggcagatttataacatctgcagagctcagagctcaaggaaagmccataacacataaaatatgarcatcaataaatgttcagaatgtgtcactggatgtgaaatatatttgtatttcctttgtgtttaatacaatgtagacacaaccttaataatcctttacacttttattacatatttaaacttaacagaacttgccaggtgtatgcctgtagttccagctacttgggaggctgaggcaagaggattgcttgagtcctttttttttttttaattaaataaaattggctgggcgtggtggctcacgcctataatcccagcactttgagaggccaaggtgagtggatcacctgaggtcgggaattcaagaccagcccggccaacatggtaaaaccctgtctctactaaaaatacaaaaattagccaggcatggtggcatgagcctgtaatcccagctactcaggaggttgaggcaggagaatcacttgaacctgggaggtggaggctgcagtgagccgatattgtgccactgcactccagcctgggcgacagagcgagacactgtctcaaaaataaataaataaataaattaaataaataaataaataaataaataaaataaaaataaacttagtagaactcaaaaaactattgacaggtgatgtaatctttttctccttctagtaagttaagtgctctcaagcatctgtctcctagaggagacaaggataagtacaactcatttcttttgaattctccctctttccttttccttccccacagatatgcatgtgtaactaaaaaagtattcagcttgctgtagattctggtccttattctctatctcattacattttattgaaaaaggtatttgagttttgtcaatacctggaaactgagggtcatctgtctaaatctgaggtaacaaatattagctttcctcaaagatcacattgtttgtgggcctcagcagtgttgaattagttgaaaaaaatacatcacttttgtgaaatctttaatgaacactttgatcacatgtggttattgctgtggaaggatatgtatttgtcttttggttcataggtttaataaataaaaattgtttaaaactaaagccctcccattaattcaagttttcctgatccatagactgcccagccactatagttctttggaacacttatgttttttctaaagcaaaaatagctttctgattacaggagtaacacatgatttttttgcaagacataaatattatggccttctatttatgttaataaacatagatctatatcacacatttattaaggatagactaccataatttattcaactatcctgctatatatagacatgaacaatttccagtgtcttgctactataaacagtgctgcaataaacattgtatttgtgtgtgtataaaacattcacacatcacacatatctctgtacatttatctgattatttcctgaaaataaatttctataaatggaattactgagtcasaagtgtgtatacattttaaggaatcttgatatgtattgtcatatattcctgtcactatttttttgtgaaatttacttactacacccacagttgaaataatcagtatttttaagtgttgacagttaaacagatgaaatttggcatcttgttgttttaattgttttaatgtatgagattcttacttttttattggtctttaagtaattataagctttatttttagagtagccttaggtcacagtaaaattaaacagaaagaacagagaattcccatatactccctgttaccacctgctttaattttttttttacaaatgatgattgcatatatttcatatatataaatgaatatatatattcatataaatatatggattgaatgactactatttaatgtgtgctagtgaaaggtaagggctttataaacatgatcacatttaaacctcacattctactatgtaaccatatataattcctattttatagatgagtacacagattaaataacttgctcaataaccacaatgtgtgatagactagaattagaacttcagtccatgtgtgtgatgtgtgtatgttttatgtgacctcaaagtctacacctttcaccttcatactatgaaataaaccacttcaggatacaaggagttttcttctagaggtatttgataagaagggagatacatactgatgtagagggcagtatggtatagaggataacaacacgaaagtttgaatatgaggacattcttaatatttcttagcttcagtttcttaatttgtaagtaaggacaatcatggtacctgtcacactgggatgttgtgagaattaatatgataatccatgtaacaagaatttaagcgaaagtctggaagatagatagataataagggcacaatgagtgctaactattattgatgacagtgttgtagagatacacaaattagataaaggtagactaaatgatctttagaacagcatttctcaacctttttttcattattgcctctcaaaggaggaaaaatatacttaaattaattttaaattaagtgattttaatttctaacaagatcaattaaatgctaaggaataagacttttcatgtagggttgggctttggagggacagaaatcattgttattagctaagagttttttcattccttaaagaccaacttttgctcccttgaaggtgatgctgcccttcattgacaatatatattttgaaacaaaatgcctccttttgaaaattaaacagaaccccacatatcaaactagtaagagagtcatcctggatttgggagaattagtggaggtatgtgagatttcctcrtacttttaaggttctttccaacatgagattctatgatcctatttatcaggcacctttgagtagacaagtcaagtctcagttccctaagctaacctcctgtctagtgggttcaaaattttccaagttctcattgaacagttaaggaatatctgtaataagtcatgaagaatgacacacaaatagtttagggttaaataaatttacaacagtgtttatctgagacatccaataatatttacaaccatagcttggctacatgctactaaatgaacttatattttttacaatgaaacttagttctgcgagtggtaaggtaaatgggaccatgtgatgtcagttgaggatgctgctccacattgagccattgtggcagttgtctaatgtctgcatagggccattttctcttactttgggctgagygaacctgtagcgaggagctttcaaaaaatattggtgctctgattagtcttaccattaggaaaaaagaagggctaccccaaaaatgccagtcctaagagatcaaagattatggttttaggtcctagtctactcctaatctgctgtaagaatgggaatttaattttttttgtagttctcacttttcttaactttgtcatggaaagaacacctaccatgcatacttctagggtagttattgagctcaaatgaaatatttgaaagttcttagcaaaaggtaactgaatattattacratttttgttatagctgtagtaaattcctgccattctttggggttacatacagcagaatagtcttctgaatccctttagtagagcatagcactggttagaatsctggtgctgaagagaccttgctaggtcagcacattacctacattgacttattcttccacatgggccatgtggtgctgagttcaaatttgtgctagttggctattaatataatccttacaacaacactatttaagtccacccattccaagtcagtacatggccgggacctttactttgactgcagttgccaaagttgattgtataaaacaggagtcagcaaattacaacctgcctctcatctttgtaaatacagttcttttggaacacagccaagcccatttgtttgcatattgccaatggctgctttcatactataatggcagggtttacttgtgatagggttcatatatccctcaaagtgtattactgtttggccctttacataaaaagtttgccaactcattataaactaaacagcaagagataattttttggagcatgcagtctgaatatgaaaggaaagagaaggaagatgtaagaagagttccatttgtaatattgtgttaatttcttcataagtaagaggttattgaaaatattgaaatgacttcataggtcctagcactctgttgagagttttattgtgagaatggattaagaggtaattttgacatacaaaacmctacagacatggaccaacctaggtgtgctatcacagtggtgggtttgggtccacatataatagcactgagctatgtgtcttggggaagaggtaggacaggtgacaggcagggaataaagacaaacaaccgtgaaaatcaagacagacttgagataatcacagtgaatgcacatgaaagacagattaaggcaattagaaatatgtatttgatatagaagacagatgattcagcattaaactaataggaacagaagatgtactcaaagatataattcaataaaaagtctctgaaaagaaaaaagaatctagaagtgtgacccgagaatattatactcggttgagatttttgtcacatttagaggcaacaggcaaatattctcaatcatgtaagtcttcagagaataatagcatctgtgagtccttcgtgaaaaaactgcttaacgatgaatgtaaatagaagacttatcagaaatggagaatctgaatgaaaaaacaaagaatcatggtgttgagcaatccacttatgagtaactaatgctaaacaaccatagatattatgattagaaaagaaattgagtatttttttttaaagacagggacttgctgtgttgccggaggtggagtgcagttgctattcacaggcatgatcatagtgcatgtctgccttgaactcctggcctcaggcaatcctccttgctctgcctccagagcagctgggactaaggcacaggacactgtgcctggcaaaaattgggtattatcttggttaatgtaaaaatacaactatatgataaaaagtggaatttggaggaaagagaaatggagaaaatatcagagttatcactttcaaaacaaagagtccagaatactgtttaaaagtcattaagtagttaaaaaaaatatattcttcctaatctcctaactttagagggatcttatagaaaataaaatatggtcaggaaatacgtatttgaaggttaataattcctataaaatttcgcttttcttttttaagtaaaattaaatttaatactctatatattttttgagacagggtctctgttgcccactctggagtgcagtggcctgttcatgactcactgcagcctcaacctctcaggctcaatcartcgtcccaccttagcctcccgagtagctgggactataggctcaccccatcacacttggctaatttttaaattttttgtagagatagggtttcaccatgttgcccaggctggtctcaaactcctggctcaagcattctgcctaactctgcctcccaaagtgctgggattacaggtgtgatccattgcgcccagccataatattctttattaacaataggacgtataacataaacctattaacatagaagaatcccttcgtatccttccatctgcaagatatggagggtgatgcatatctaatatgaaccatgttaatttctgggtattgcaaagtggaagtgatatatatttccatctttgtgcttcttgtattgtttgaattattttttaygaacatagatacattttacaaaaacaagaataattattttgtccatattaaaaaaaaatctaaataagtggaagtatatatatccagatgtgaacagtggtaattaagttgttctttgtattttcttattttcaaaatttttaagtttttaaattacaaatgaataatagtactaaaattgtacttgaactataatcttaaggactttcatgttatagggaaactgaagcagaaagtatgcctaagagtaacctagtttgtaaataaaacattttatcatacttgttaagaaaactgatttttagcagggtrtggtagttccagctacttagggggctgaagtaggaggatcacttgaccctaggagtttgaggctgcagtgagctatgattgcaccactgcactccagcctgggtgacagagtgagaccccatctcttaagaaaagaaaattgatttaatttatagaagcaaaaattttcatgttcatgtaaagtaaattaatttctgagagagccagctcatttttcaaatctatgggaacaccttagagatttcatacatcaggctcactcagaccacaggggacaagcagagctaagaagaccagtattattaacataatttgttctcctggcagtactgggtactattcatagtcttgrtgactacagtattaataaacaccactgatgacccaaataataataacaaattttctagtcactctgagcagaatattgttttactttctatttccagataatctgcctctttccctccctctctcttcccctcccctcacccacttcctttctacacacacacacacacacacacacacacacacacacmcaaccaaaaaaaaaaaaaaaaaagggattctaccgattttaccaggatatgcatgtaacaatacctcattaaagaggaaaaaattgggttgcaaaaaatagttagatggaaaaaataagttctgttattcaatagtacagtaaggaaattatagtcaacagtaacttgtatatttcaaaataattaatagctagaagagaagtgaaacattcccaacacaaagaaaagataaatgaggtgatggatatcccaattaccctaatttgatccttacacattgtacacaggtgtcaaaatatcacatgtacctccaaaatagatgcaactatgatatatcaatttttaaaaagtgggaaaaaaggaaaagctcaaaaccttcctcctcaaccccaaatttttaggtgaagcttctatgccctgagataccgtgaatcttggagcttggatgcctcacccctcccgctctgagaagcacagctttaacctttgtcagccttgtcctcactgctcctctctcttttcacctcttcacttgcactgtttgcaaaaaccaaataaagaaaacaacaacaacaacaaacaaatgaaagaatcaggctagtgcttggagcaggtcatgtgctaccaacataaaattaagtagggagagttttctaccctaaatggtgacacatgtgcatagtttagatggcactagacttaactggctttatttccatgttccctatgttattcttgctttcctcataatcttctacaaatttttctttagattttgcaaacatcattaactcaataaatacttgtttactatatgccttgcactatgccaagagtgaagaataggctcaaaagtctacttttttgtagctattgaggctgtaaccccatgcttggtgtaatttaggattagtggccagtgatcagtatcagaatattccaatttatacatgtattatctcagtagctattttggccacaataatacactgtttagtcttgatttcttgtttgatccactctgtaaatgtttctgaatattctcatctagtccctccccatcttaatcaattttatgcattttatttccagtgactcacagttacttttaaagaactttaatctgttctaactacatgtgctaggtgattaaggtcactatgaattctgacstggtccttctcctttcttccatcttatcttgtcacgaaaacactctactaagatctgcggctggaagacggacatgcatttagttaatttcccaagttcctgttcttatagttaaaattattcagacactgcatccagataactgacatttatcattagaacatatttcattcttaaattagagccgtgacttagggctgcctgcattgactctgtgtagtcatcctgatagttttgctcagtaaaacatggcttttctgttaagtttgaatgatcatcacagtgaaagacctgcagctggaatggaagaaaagctgcagaaaattattgaaataaaagatgggatttggaccactggggcttgagcaaaagaagtgtgaaacaacaggtgccatgggatgttatctacgtttttaaattaacatctgtttttagctgaaagcaatttgcagagaatgcaccacgtgcctttattcagagctaaacactgactactgagacgccgctaagtagtaagggtttagtaaaatataaagattttccttgggaggaaagaataatggagattattcactggatatagatgtctaagagaaatctctgttaaacctatgtttggcataaggtatggtagcagtttaagaattttttcatttgggaaaattgaaagaatctagagaattgaaaaaaaataaaaaccaacaagggtttctggaagggagtcaaagtagtcttcttgattagcttttgtcagatagcgaaatatgtactagttgagactaactgtgcaatattggtgcttaagtttctctgcataaccactgcataactgcaattataacaagacacagacttccattattcagcctaaaatcgaattcaaagctaaggtttggtttggtttgtactgtttggaggaaaaatgattcttagaaatgttttaatagatacttctttttcacacatatataaagctgctagtctgactctcctaagaaatgttattttataaagtacaatttttttttttagatggagtcttgccttgtcgcccaggctggagtgcagtgatgtgatcgcggttcactgccacctccatctcctgggttcaagcgattcttctgcctcagcctcccgagtagctgggaccactggcatgtgccaccacacccagctaatttttgttgtttttagtagagatgggatttcaccatgttggccaggctggtcttgaactccttaccttgtgatccacccgcctcagcctcccaaagtgctgggattacaggcataagccaccgtgcccggccataaagtacaatttttaaaaatcatggaattcacttctcagggggtattttggttgtggccagtttggggctattacaaataaaacttccatgaacattcatgtacaggtttttgtatggatgtgatttcatttctctggaataaatgcctaagagggtgattgctaagtctggtgctaggccatgtatggttagttctataggaaactgccatactgttttccagaatgtctgtgtcattttgcattcccaccaacaatgtgtgagagatctggtttctcctagcattgccattttttattttagctattataatagatatgtaatgatacctcattggggttttcatttgcattttcctgatggctaatgatattgaacatcttttcatgtacttatgttctatctttatgctctctagtgaaatatcttttcatgtccgttgcctattttctaactgaattgtttgaacatatgcttctaaaaaagtttatggatttttccttggaaatgcaaggttgcacgtcttaagcatgagagaaatattgcaagacaatttgatgatattatagatgtttaaatgtagatgtcggaactagaatgttgtgattggattatggtaagactcaaatattggcaaagtagtattgagatacgaacatacaagggagggagaaggaaaaagaagggaagggaatgagggaaagtggaaagaggaaggaagggagggaaggaaagagagagtgcaaggacagggagaagagataggtatacatagaaataagaaagcggataagtaagggagagagtggatccagggaagaaaatgaaatatgtcaagtctaagtataacctaggaacaagggcttttgtcagggactagaaagtatttatgggactaatgggcagtgagactgggtagtctgtatagaaattttggggatttaaaaaatgagttataatctgtgatagtggaaaagaatttgacttcctttaaattgcatctatgctgaccgttagtggtagagttaagagagcattggaggccatcctggtggctcacacctgtaatcccagaactttggaagcctaggtgggaagattgcttgaggcaactagttcaagaccagctgatgcaacaaagtgagaccccatctctacaaaaaataaaataattagccaggtgtgatggtgcacacctgtagtcccagctgctcatgaggctgaggtgggagggttgcttgagtatgaggctgcagtgagctgtgactgcacctgcactgcaacttgggtaacagagcaagaccctgtctctaccaaagagtaagagatctttgacaagctacttatctatatactgggaaatcaaatcatctgaatctcctgtatttctggagtgttgtatccaataagacaattactagaaaacatttttaaatctgtaaggtgttctgtaaataaaagctgtgagtgctagttaaaaaaaaaacaggaatatagtaacaggactgaaatattataagaatgcaaatacaaccatgatttttttttcttttttaaaaaacttttaggttcagagatacatgtgaaggtttgttacatacataaacatgtgtcatgatggttgttttacagattatttcattacccaggtattaagcctagtactgaataattagcttttctactcctctccttcctcccacctccaccctcaagtagaccccagttcatatgtttgtatcatttagctcccacttataagtgagaacatgcagtatttgattttctgttactatgttagtttgctaaggataatagcctccagctccatccatgtcactgcaaaagacatgacctcgttcttttttatggctgcatagtattccatggtgtatatgtaccacattttctttatccagtctgtaactgattggcatttaggttgattctatgtctttgctgctatgaatagtgctgcaatgaacatttgcatgcatgtgtctttatggtagaatgacttatattcctctgagtatatacccagtaatgagattgctgggtcaaatggtagttctccttttagctcttggaggaatcgccaaactgctttccacagtggttgactaaattaacactcccgcccccagtgtataagcattctcttttctccgcaaccttgccagcatctgttgtttcttgactttttaataatagccattctgactgtgagatggtatctcattgtgcttttgatttccatttctctaatcagtgatactgagctttttttcatatgcttcttggctgcatgtatgtcttcttttgaggagtgtctgttcatgtcctttgcccactttttaatggagttgtttttctcttgtaaatttaagttccttatagatgctggatgttagacctttgtcagatgcatagtttgcaaatattttctcctattgtgtaagttgtctgtttactctgttggtttctttagctgtacagaggctcttaagtttaattagatcctacttgtcaatttttgcttttgttgagttgttttggtgtctttgtcatgaaatctttgcctgttcttatgtctagaatggtattgcctaggttgtcttccatggtttttatagttttaggttttacatttaagtctttaatccatcttgagttgatttttgtatgatgtaaagaagacctccagcttcaatcttctgcatatggctagccagttatcccagcaccatttattgaatagatactctcttccccattgcttatatttgtcctttgttggaggttagatggttgtggatgtgtggccttatttctggtctctctcttctgtttcactggcctatgtgtctgtttttataccagtagcacgctgttttagttactatagccctgtagtatactttgaagtaggataacatgatgtctctagctttgttctttttgcttagggttgcctttcagtgtggacatttagtgctatgaaattccttcctaacactgccttagctatgtcccagagattctgttatgctgtatctttgttcttattattttcaaagaacttmtggatttctgccttaatttcattgtttatccaaaagtcattcaggagcatattttttaatttccatgtaattgcatggttttgagcgatattcataattttgacttctatttttattgtgctgtggtccaggagtgtgtttggtatgctttcagtttttttacattttttgaggattatgttcaattatgtggttgattttagaatatgtgccacatggcaatgaaaagaatgtatattctgttgttttggggtggagagttctttaaaggtctatcacatccatttggttcaatgctgagttcaggtcctgaatatctttgttaattttctgccttgatgatctgtctaatactgttagtggagtgttgaagtgtcccactattattgtgtgggagtctatttctctttgtaagtattctaagagcttgctatatgaatctgaaggctcctgtgttggggtcatatatattgaggatagttaggtcttcttgtggaattgaatcctttaccattatgtaatgtccttctttgtcttttttgatcattgttggtttgaaatctgttttgtctgaaattaggattgcaacccctgcttctttctgttttctatttgtttggtagattttcctctatccctttattttgagcctatgagtgttattacctgtgagttgggtctcttgaagacagcataccattgggtcttgcttttttatccagcttgccacattgtaccttttaaaaagtggggcatttggcttggttacattcaaagttagtattgatatatgtggggtttttttgtttgtttgttttttgagacagagtcttgctctgtcacccaggctggagtgcagtggcacagtctcagctcactgctacctccatgtcctgggttcaagcaattctcctgcctcagcctcccaagtagctgggattataggtgtccgccaccatgcccagctaatttttatatttcagtagagatgggggttggggggtctcaccatgttggccaggctggccttgaattcctgacctcaagtgatccacctgcctcagcctcccaaagtgctaggattacaggcatgagccaccgtgcctggctgatatgtgggtttgatcctgtcattgtgctgttagctggttattatgttagcttgtttgtatggttgcttgatagtgacactgscctgtgtgtttaagtgtgtttttatattagctggtagcagccttttctttctatatttaatgctcctttcaagatctcttgtaaggcaggcctggtggtaatgaactacctcaacatttgcctatctgaaaaggatcttatttctcattcacttttgaagcttagcttggcgcaaacaagaatttcaattcttgtttgaagatttttttctttaagaatgttgaatataggtgcccaatctcttctggcctgtaaggtttcagctgagaggtccactcttagcctgatggggtttgctttgaagatgacctgccctttctctttagctgtctttaacatttttttccttcattttgaccttggaaaatctgatgattatgtgtcttgtggatgttcttcttgtgtggaatgttggaggagttctctgtatttcctgagtttgactgttggcccctctagcaaggatggggaagttttcatgcaccatatcctgaaatatgttttccacatgtttgctttctccccctccctttcagggatgtcagtgattcatatatttggcctctttacataatcccatacttctccaagtttttgttcattccattttattctttttatttttgtctgactgtcatttcagataatcgatcttcaagttctgagattctttcctaagcttgttttattctgctgttaatatttgtgattgcattgtgaaattcttgtattgtgttattcagctctgtcagacctgttaggttttatatacatatacacacacacacacacacacacatacatatatacatacatacacacacatatacgtacacacacacacatatatatacacacacatatatgtgtgtgggggtgtgggtgtatgtgtatatgtatttttaatgttgaagctttggggtgtgatccagctggtggcacttagacttattggtcagttggtagactcttgcttaatgattgtgactcccctatgtttgctcacagttgcagccattttccctattagtgctctgaatgtgtgggttcctttcccccttgagtgctggctgtagatcatgacttggcactcctggggtgcctacttaagctctggagagatctcagtgtttatgttcctyccccaacttggaggcagcagaggaagggacctcatagtggttatggccaagtgttgtatgcttgtctcctggaggctcttctccagagagatgcaggtcagcaatcactcagtgcaatcagcccaggatggaaggtctgtgctgtgggcccaagccaggggttccttgtctggtgacaagcacttggggatgtgtgggattggtgggagacggactggcctctctttgggtctactgcagcttgtaagaggtgtggataaggcatttagggtctttgcccctttgttagtctgagggtggcaagggcggttccactgtagaggcagtggcagagaggctttcagttgcccctgaaggctctgttcagggagttgctgacttgctactggctcaatagctctggcaggggatgactggaggctcagacctggaggacctgcccagtgaggagatatgggaatgggcaaccacatataacagtttggccacttttctatagggctgctgcagtattctgggggcctgctcccgtcccttgtcacttcggattttccagtacctggaggtatcaccagggaaggctgcaaaacaacaaagatggcagcctgcctttccctctgggagcttcatcccagggacatacggtgctgttgccagcccaaagacacctgtaggaggtggatggagaccctagttgggaggtcctgccaagtgaggaggaacaggattgggaaactgcttaaaaaagcaccctggccacgttttggtagagcagctgtgctgtgctggggatcctttccayccctggtcagcttggactctccaaagcctgactggagcagctaaggcacccaaatagcaaagattgtggcctgcccctcccaccaggagcgccttctcagggaggtgcaatgctactaccaggggctggctggaattccaagccagtgggtcttatcttttgaggtgctgtggaagtgggacttgcaggctgtttttgctcagtcccttggattcagcctctttcctaggggtatgttccaatgtctaacctcccactttgctggagccgcagctacttttgccagaaagcccaagtatctaaggctccatggtctctacgtgtgccttagggactgttctacagagactccaggtagctctgtctgtcagactgaaggccccggtggagtgggttcacatagagatctcttgacctgagggttgcaaagatctgtaggagaatcgtggttccctggggtcacacattcattcactgcttccctggctctgtgttgcttccgggtgggccatcgtcctgttgtgcttttctttgttctccgtgggtcaggttgtttccttgattagtcccaatgtgagtatacaaccatgattttttttaaaaaaggactttactaatttttattagaaagggccactaccttactagtttttttattagcataaccattattacacaccaataggacatagcaggagtcagtaaattcatgtcatattcacattatttgtgaagtatgaataccagcatccaaggcacagagcttgcaccctcaagtagagaatgtgtcattcctttatgtatgttcctagccttaatggaggccagggaaggtgtctggcaccaagatcatatgctcaacagctgcctttccactgtaggagatactggctccacgttcttctcctctttgcttttgaacccagattgaattaagaatattgaactgtattcaggcttctggctgttgtcttgtcaagtacaacttactatgattccctgaatgcattcatcccatgrttcagttaaatatccatttagtttatattttatcatactactaagttataaagtatcggcactcaacattgaaaatggtttcacattgatttctgaagcatatttattgccatacattaatttatcactgtaatctcatgaatttgttgggagcagaaattatatcattcttgccttttagataagaatatgaagtataggaaagtattgaaacttaacactttttaaaaacattttcaacttttaaaaaaacaaaaatagacaagtgcatcctgattaaatgaaagagcttctgcacagcaaaagaaactatcaacagagtaaacagacaatctatagaatgggagatgatagtcacagattatgcatccarcagaggtctactacccagaatctataaggaaattaaacaaatcaacaagaaaaaacaaccccattaaaaagtgggcaaagaacatgaacagacacttctcaaaagaaggaagacatacaagcagccaacaaacatgaaaaaatgctcaacatcactaatcattagagaaatgcaaatcagaactatagtaagataccatctcacaccaatcagaatggctggtattaaaaagtcagaaaacaacagatgctggtgaggctgcagagaaaaggttatgcttatatactgttgttgggagtgtaaattagtccagccactgtggaaagcagtctggagacttctcaaagaactgaaaatagagtcaccctttaatccagcaatcccattactgggtatatacccaaaggaatataaatcattctaccaaaaagacacatgcactcctgtgttcatcaccgcactattcacaacagcaatgacatggaatccactcatgtgcctatcaatggtgaatttgataaagaaaatgtggtacmtgtataccatggaatactatgcatctgtaaataaagaaatcatgttctttgtagcagtgtggatgcagctgaaggccataatcctaagtgaattaacaggaacaaaaaccaagtgccacatattctcatttataaatgagagctaaacattgagcatacatggacattaatatgggaacgasagacactgtggactactagatgggagaggaaaggacaggtcattggttgaaaaactacctatcaggtattaggttcactacatgggtgaygggatccataccccaaaccttagcatcacacaatattcccatgtagcaaacctgcacatgtacctcctttatctaaaataaaagttgagccgagcacagtggctcatgcctataatcccagcactttgggaggccgaggtggatggatcacttgaggtcaggagttcaagaccagcctgaccaacatggtaaaaccccatctctactaaaaatacaaaaattagccagatgtggtggcacacgcctgtaatcccagctacttgagaggccgaggcacaagaatcacttgaacccaggaggtggaggttgcagtgagctaagattgagccattgcactctagcctgggcaacagagtgagactccatctcaataataataataataataataataaataaatgttgatatttaataaaattagagacaaatatttagaaattttcattgtttcaaaatattttattatttaattagatttcaggatagaaagcaagggagggaggaaaggtctaaaaagtatataaattggctatttgcatttagtaggtaaacaaagcaccatagaagcttataatttgccttgccgtgccacagaaatgcttgcaaattgccagtagacatccaaagctttacataatccctacactaagcaagagtacaatttagagccaaaatggagtgggaaggactattacagtccttcctctttcaacataccctatactgtgccctgcaaagaaagggcttagacctcagatcaaatggacagtagctcacagtgtaagccttaaacccgcaacttccagggactgacaatgggttggctcagatatggctgttagagagaggagggtgtatgcaaaagagaagcacacagtattttttttttttttgggtttcgttgattttctctatttcctattttctttttttatactctaagttctaggatacatgtgcacaatgtgcaggtttgatacataggtatacatgtgccatgctggtttgctgcacccatcaactagtcatttacattaggtatttctcctaatgctatccctcccccagccctgcaccctccgacatgccccggtgtgggatgttccctgccatgtgtccaagtgttcccattgttcaattcccacctatgaatgagaacatgtggtgtttggttttctgtccttgtgatagtttgctgataatgatggtttccagcttcatccatgtccctgcaaaggacatgaactcaccttttttatgactgcatagtattccatggtgtatatgtgccacattttcttaatccaggctaccattgatggacatttgggttggttccaagtctttgctgttgtgaatagtgccgcagtaaacatacggagaagcacacagtattaaggagaggaaatcctataccccatgaattcttccatttcagtctttcagaaaaggagggctggaatytagcctattccctgaatgtgatctgggagagcctgcaactaaattgaaataatcctgctatttttttattcagcagagatgagcagtgctgtaagaaaccagggggtagagctagcctagtaaattagtttttataagcctcccttttcgtaaaggtatttttctcttcaaaggatgaaaataagactgttcctaagccaaacagcttcaacttcaaatgtgtcattttaatgcagatttatataccttttttatatgggggctaaaaaggaaagaaaccaacttgggttttttttccccagaggattctgactaccattcattattaattgattaatgaaaatgccaataaacctttaatttttgtatgatgttataatttaatcagaaataatttatctttgaaaataattcatatagaaagagatagtctagaggtacaaaatagtcatgagtagtggttaatttgatacagcttagaatagagtgaaatttaggatgggttttaaattaactaaaataaaattaaaagaaaataaatttttagtactttatgacttagaataataaaattgtacttctatacatttaaactaagatctgaattattttatttttgaaatttatgccctatatatacaaaaacaatgagttaaaatttctagtaaagaaacaggtacttccaacaacctcatatttctagaaaaaaaaaccaggaactttgactaaatcattacttctattcatacttcacagacaaaatttaacatgaacaaccaatccatgtaaattttttacagatttattaatcacaaattttcatccctatactaaacacacaggcacacagacctctcctacttcaacaggagaactcggttgtagtttccataagtggccatgagaaacatttctgaaaacttctatggacatctcactatctcaacatgttttcaggtccacaatttatactgctattttatcagctcagcttttctgaatatccctgatgtctgaagagccagaatatgttcccacttgttaacagttttctccagaggcatatccttggttaaacagtagtgttgaaactctcctttgttgggccttatctttttactcatattcttattttttaaatatacttgctgccattaatttggagttttctattttaatttattttagactgatttactgtcatggaattattcttcaacttagtattatttttcatgtaattataatrtccgtagtcattttgcaacattatatcatcaatacccatataagcacaattaaatatacatggtatctcctaccattattatatggtaatagagtcagtctattaccagtttcctcatcattgctgtcagaaaaaagtcttagaaataatgtctttagaaatataacaccaacaataagattaattggtacatgtcatctcaataatcaacagcaattataattaagaatagcccctctactaggtattgaggaggatgcactagttatgaatgcttcactaattcttcattgacagctctgctatagcacttatagtctgaagtttaagtcagttgtggagatagcatgcagtaatttttgaaaagtccaaggcttggagtcaaacacaactaagtttgaatcccagcttcctaatttattggatgggtaactttgggtgagttacttaagctattactattatttccatctttatagatgaagaacttaccaaactttaattaaatgccaagattataaataataaataataaagtgactagcatgtattaagtactttgtaagtgatagctattatcattgtgtttgtggctatctcgcctactagactgagtttcttaaggtgagaaagactaatgtcattagtttttctaaactttttagtcctaccacaggacatcaagcattaggggattttgaaaatacccyataaaagtaaatgtagttatagctgacatctagctgatgataacttttgaatgatactaattttaaaacttgcaaggtccaaaatgacagaagtttaggtccctaacatataagtcaaagagggggctggcattagggagggccacaatcaaaagtcagggccatagctgggactcaataaagctcagatgaatatccagtcgggggcgggggggggcaatttccccctctcagaagttatttcttcaacacccaatgacccccccacaaaaacagcccaacatgggagctacttgatcattctttttccatgactacaacatggcatttctaatcttgaattctgaaaaccaaagaaccagatctaaagaaggatctataagcctggggcaaatacttaattcttttccaatgacagtagagcaacactatggtaaagagtgtgagttttggagcaagactgccaggctccatgtcctaytatgcaattgagtagctatgggagcttggacaagttaagggttgccagatttagcaaaaatacagaatgcccagttaagtctgaatttcagataataaataattgtttcatataagtatgtcccaaatattgtatcagatatacttataatcaaaaattattattcatctgaagttcaaatataactaggtgtcttgtgtttcacctggcaactcttatttaacatctctgtacttgagttttctcatcagttgaatggggataatagtactaccaatttaacagggctgttgtcaagattaaatgaattaatatatgtaaggtacttaaaatagtaactagtacacagaagatcctaataaatattacctgttgttgttactgtggctattgttgttagggttgtaatatttaatgaaaatattatttgagagttcctgctttcagctatgataattatttggaaacagactgaccctcttgccatagacaattattaaactggacaaaatgcactgaaaatttgtctttagatattaaaagattgacagtataggactctgatccctgagaattaaaaacaaatgaggtcaaccttatgatcctctggttttatgatgagaggcactttctagaccagagagcaaagagagggaatgcaagtggaacatggcagttttttgagttagttggagttcagggaagatgaggcagcttgaatttgcaggtttgtgtactggagaggcaggtgctttgtggagaaagagctccataaatctacataagagtcaccttgagtctttggctgaactctgagctatgcattcatagagtgagatgacttgaggctaggmaaagaacaataacaggcagttccatgtctcccagaaagggagctgccctagaatccctgctggggattggctgggagcagcctgtgggaattatatgttctgtgcagatgcactaatggatttcagaccatagcagccagggctgctggtctattttgttgaatgaagtcagaaatctgaggggtgcattctcaagatctccactatccacctattggctgaataggtctacttttccacataggctcagctattccatagtaactgaggggaggtgaaatgggaggttcataatataaactgaacccactgtcactgcatctcatctcggcttcaratgattcttactctccctgctatgctttccattttttcttgtgccataacaattggggtatttcacttcattgagtattggacattactttttccaggcatctaagagccattccagcagcaattagctccatctcttgggctcctcagtaaggtgttaaatcctgtgtcctgaaaaagtacctccacataaatggactcttacccagttttccattccagctcccatgttcaagcatcctcttaatccaatccgagaggtgctcccctatttttgctggcacatagtgtcgaattcttgcaactctttagttgtatagtctcctaccttatcaggttcatcatgtccccagctggattgtgctgagatttgactgtagttatcagcctggcagccaggataaaggtagaggcatttcctgagagaggggagtaggtactacattgtggggaaaggtctctgagcttcttctagtacagtggagtgctggctcagattcaagagttctgcagtatcagaatactcaagggcatctattcagaggtacccatttcatatttcaggattccaagtgttactaagcagttccctgactttagtaaagcagacctgccttgatgttgcatcttaacatctctagagttctgatcaacaattagatcttctacttgtctactatgtctgcccttcaaattaagaagataagaacctctgtgagctaccagagagattctctgtcacatttagtcattacctgtaaatagcactcagtctttcactagccttcctgaaagcatatacagcttagtagcaatcagcaaattccactgacttagtgagacttgcctatctgtgtcctgccaactgcatgtactgcagagcggttctacagaaagggcactgggagtcttcaagccaaagttgcccaactaaagtgccttatgtcacctagaaacagactgcmttagtattgctctttctgaataatcacccattgcctaggagcagcttatggaaagtgtagtcctaacatgaaaatacagtgataaacttcagaatgcagcaactggggctgtagtaaattttctgtgtaataggaaattggagatgtatatggtagtagatgccacactgcggtttataaatagaagcaggagtgatatcattaaacacagctgagtaagaagctccaagaattaatgcctccactgaagcaactgttaagtaggcaaaaactgacagaatcaattttttgaaaattagattataaagaatctaatgaaacagagcaatcaggtgagtgcttaatgaagatagaagctgctaaattttggttagaaagcatggtggcattttggttacctgtgtatcacccccagttcccagtgtgatagtggccataaggacatttctggtgtggttagttggtgccagagggccattacaaaccttgttctcagaaactgtggttgtgtattttgaccagtctggtggtttccagaggaactgatacagaggttcggttttttcacatccctcaggctggaatagcatttctggcagtgtgtatctaaagcatgtaaagacatgtaatacctatatrtctgagaaaatacctagctgtctcagtcaagggatggcaaatggggaaagcagcagacagaccaaagaaacctgggaaagaaaaggatgaggagaaagatatttgggtgaataggagccatgaatagctacttgcatatgttagtgaattgtgtacaacaccatgcccagagctggacacaggctcagaaataatgagatgcaccctgggtttacacctctggaggactttcagagtctgcacaagtaagaaagaaatggtaaggcagaatgtcaggcagcctggctaaacagtgaaggagtgccctagttctcggaaaatttttgtctttgttcatttgttattgtgcttcaggatttaaaggcatctctgttaggtcaccagctaatgacagagataatgaaatggagacttcaccgaccacaaatgacaaggaatacaggctttgcaagattagtttgggaatgtcactaataaaatgggtgactgcagccctcagcagtaacaatagcaaaccatggagagggaaataatctgatttccagagttataacattaaaatatttaaaatgtcaacaaaagtttaaaagcaggaaggtatggcccattcacataaaaaagaaaaaaaaatagaaagtatccctggggaagcccagacattgaaattactagacaaagacttaaaatcaactgtcttcctttaaactcagaaagctaaaggaaaccatggacagtaaactaagggaaaccaggataatgatgcctcagcaaatagagaatatcaatgaagagatagaaattataaaaatgaaccaaatagaaaagttggagctggaaaatataagaaccaaaatgataaatttgctagatggcattcatcaagtttgacctggcagaagaagcattaaaataggacatgaaaataggacaattgaaatgatcaactctgaggaataaaaattttaaaaatgaagaaaaatgaacagagtctgtatatgcagcatagcagcatatatattatgggagccctagaaaaagaagaaagactatcagaagaaattatggtagaaaaatcccaaatttgattgaagacatgcatctgcacatgcaagaagctcaacaaaattcaagcagaatcaactcaaagatcaataccaaaacacattataatcaaaaccaaatgacaaagagagaatctttaacagaaagtaagaagtattttgtcatgtagaagggatcctcaatatattaacagatattctcattagtaatccatgtagaagggatcctcagtatgttaacagatacttttctcattagtaatcattgaggccagaaggcagtgagaagacatatgcaaactgtttaaagaaaaaaaaaaaatcacctgtaatcccagcactttgggaggccgaggtgggcagatcacttgaggtcaggagtttgagaccagcctggccaacatggcaaaacctcatctctactaaaaatgcaaaaaaagaaaaaaagccagatgtggtggtacaagcccgtaatcccagctactcggaaggctgaggcaggagaatcgaacctgggaggcagagggtgcagtgagctgagatggcaccactgcactccagcctgggtaacagagtaactcaaagaaaaaaaccaacaacaaagaattttatatccagcaaaattatctcttaaaaatgagggagaattaagacattctagataaaagatgagggagtttttgctagtagacgtgtcttataagaaatgctaaaaggagttcttcagactgaaatgaaaagacactggacagtaactcaaagccatagaaagaaataaagaacgtgtaaagataactacataggtaaatataaaagacaatactactgtatttttagattgtaagttttcttcatgatttaaaaattaatacatgaaacaataattaaaacctatgtaaatggggatacaatatatatacatgtaatttatgacaataataacagggtagatagagctatagagaagcaaagtatttgtatgttattgaagctacgttggtgtgaattgaaactagattgttataaatttagtacattaattataatccttagggtaaccgctaagaaaataactaaaaatatatacagaaaaggcaatgaagattaaaatggtacactggaaaaaatttgcaaaataaggcagtattggaagaattatataacaaaacacatatgatttatggaagacatagcgaatggtagatgtactttcttatcagtaatcaatttaaatgtaaatagataaaatttgatacttaaaaggcaaagattgaaacaacggattaaatcagggctccccaatccccaggccatggacctggttagggtccccaatccccaggtaccatggcttgttaggaaccaggccacacagcaggaagtgagtggtgggagattgagcattaccacttgagctctgtctccagtcagatcagtggcagcattagattctcataagaccatgaaccttattgtgaactgcacatgcaagggatctaggttgcatgctccttatgagaatctaattcctgatgctctcaggtggaatggtttcattccaaaactatcaccccctccccaccccatccatggaaaaattgtcaaaaaagttggggaccactggattaaataacatgatccaaccatatatgttctagaagtgactcactttatatccaaagacacaaataggttcaaagtgaaaggatgaaaaaatatattctatgcagtggtaaccaaaagagaggtggggtggctgtactaataacaaataaaataagatgctaagacaaaaattattacatgaggcaaagaagaacatcatatattgatgaaagagaaaatgcatcaagaagatattacatatttaacatgtgtgcaccaaacagcagagaccaagatatatgaagcaaacattgatgcaattgaagggaatagaaagttatacactaatagttgatgacttcaatagctctgtcccatctctctagatgtcccacctctagagagaaagtcaataaggaaattgagggtttgaacaatgctataaactaacgacacccaatagatacataaacagaatacactacccactacccacaacagcagaatatacatttttctcaagggtattctgcaggatagatcctatattaggtcacaaaacaagtctggggctgggcgtggtggctcacgcctgtaatcccagcactttgggaggccgaggagggtggatcacctgaggtcaggagttcgagaccagcctggccaatatggtgaaaccctgtctctactaaaaatacaaaaattagctgggcatggtggtgcgctcctgtagtcccagctactcaggaggctgaggcaggagaatcacttgaacctgggaggcggaggttgcagtacgccgagatcacgccactgcactccagtctgggcaacagagtgagactctgtctttaaaaaataaacaagtctgaatacatttaaaaagacaaatcatacaaaacagtttctgtcagagtagaatgaacctagaaattaatgaaggaaactgaaaaattcagaaatatattgaaattaaacaaaagactcttaagaggtcccagaagaaatcacattgtcaaatttgacagaaattaaaaatgaaaacagtgaaacttacggggtacagcaaaattcatgctcacagggaaatttatagtggtaaatgcctacatttttaaaaaggaggaacttctggatttaaaatggcagtgtaaatgcaagctgccttaactccccctcccacagaaaaccagaaataaatatacaacggtgagatttctaccaacaacaacccagaactcaaatatgaggatgatacagatcccagggccacagagaagtgaaaacattctgagcagatggtaggagaattggactttcacatccatcataccccttactcctattctgcctggcaacaagtgaatggaaaaatcttcacttcagttcacagtttctatactggaaaaagtaagattaaggtggtcaaccagcagtcacactatattggggtccctggtaggagacctgcccttgtgttaatccacaagaagcatcatgactgcttaaatgaagaaatatcccttaggagaggcagagacagagtaggtaggcaggactactatcctccaccctggaaactctgctctggaacttggccaaaggagacgccaaatcacrgtggttattcagcagcaccacactttaggaggtatgtttcacaggtcccttggacaggaactccttgccagccttcacatactgctgggataatccctttaggaccgcaccatttgggacaggcagaactctgatcatttactatagctgaggagaacctgggcttaaagagccaccttgagccaaaaaggaggcagtgacctaccagtaaagataggctaagcaaatatattcaataaaaaacaaaacaagctggacagaaaaaacaggaatgaataatccttcaatgcaaagacgtagatgtatacccgtaagaaacaccaacaaagagaaccatgagcttcccaaaaggactaagtaaaaatccagtgactgacgctaaacatggtatatcacattaacagaataaataacaaaaaccatatgattatttcaatagatggcaaaaaaaagcatttgataaaattcaatatacctttatgattgaaaaccctcatcaaaataagtatagaaggaacatacctcaaaataataaaggccatctatgacaaacccacagctaaaatcatactgaatggggaaaaattgaagactttccctctaagcattggaaaagacaaggatgcccacttttcaccacttttattcaacataatatggaaactcctggtgagagcaattaggcaagagaaaagaagagaaagggcatccaaactggaaaaggagaagttaaattagccctgtttgcagatgacatgatcctatatgtagaaaaacctaaagaccccaccaaaaaactgttagaactgataaacgaattcagtcaagttgcaggatataaaattaacatacaaaaatcagcagcgcttatatataccaacagcaaacaatctaaaaaataaatcaggctgtgcacggtggctcacacctgtaatcccaacactttgggagtcagaggtgggcggatcacttcaggtcagaagtttgagaccagcctggccaacacagtgaaaccccgtctctactaaaaatacaaaaattagctggacgtgatgtcgtgtgcctatagtccagctactcgggaagttgaggcacaagaattgcttgaacccgggaggcagaggttgaagtgagctgagattgcaccactgccctctagcctgggtgacagagtgagactccatctcaaaaaataaaaattaaaaaaataagaaatcaggaaggcaatcccatttataatagctacaaaaaaaaattaagtacctaggagtcaatataaccaaagaagtgaaagttctgtacaaggagaactgtaaaactctgatgaaagaaattgaagagacacacatacaaaatagatattccatgtttgtaaattggaagaattaatatagttaaaatcacaatactgcccaaggcaatttacagattcaatgttatccctatcaaaataccaatgacatttttcacaaaaatagaaaaaaaactatacaatttatatggaaccacagaagaccctgaatagccaaagcaatcctgaacaaaaagaacaaagctggagtcattacactacctgacttcaaaatttactacaaagccatagtaactgaaacagcatagcactggtataaaaacagacacataaaccaatggaacagaatagagaaccctgatataaattcacacttttatagacaagtcatttgcgatacagacaccaagtacatataatggggaaaggacagtcttttctaattatccatatatatatatatatatatatatatatatatatatttttttttttttagatggagttttgctcttgttgcccaggctggagtgcagtggtgcgatctcggctaactgcaacctccacctcctgggttcaggtggttctcctgcctcagcttctggagtagctggaattacacacacccgtcaccatgcttggctaatttttgtatctttaatagagacggggtttcaccatgttggccaggctggtctcaaactcctgacctcatgacctcaggtgatccacccgccttggcctcccaaagtgctgggattatgggcgtgagccactgtgcctggccctaggagagtcttttcaatgaatgatgctgggaagactggattactctttgaagaacaatgaaggtagaccccatctctcaccatacacaaaaattaaattaaaatggattaaatacttaaacccaagacctgaaagtataaaactactagaaggtatcattagggaaaggctctgggatattggtttttgagaagacattttgtgtaagacctcaaaagcacaggtaaccaaaacaaaaatagacaaatgagattacctcaagcaaaaaagtttctgcatagcaaaagagatgatcaacaaagtgaagagccagtccacagaatgggagaaaatatttgcaaattattcatttgacaagagattaataatcagaatatataaggagctcaaataacttaatagcaaaaaaaatcctattttttttaaatgggcaaaagatctgaatagacatttttcagaagaagacatactaatggccaacatatatgtggaagaactgttcaacatcactaatcagagaaatgcaaatcaaaaccacaattacctatcatcttatcccagttaaaacgacttgtatccaaaagacaataacagatgctggtgagattgtggataaaggggaattcttatacaccgttggtgagaatgtaaattagtatagccactatgaagaacagaatggaggttcctcgaaaaactaaaaccagaactrctatataattcagccattttactactgctttaaatatatactactgcatatatatccaaaagaaatgaaatcactatatccaacagatttttgcccgcccatgtttattacagaactattcacaatagccaaaatatggaagcaacctaagtgcccattaatggatggatggataaagaaaatgtgktatatatacacaatggaatattattcagccatcaaaaaatgaaatcatgtcacttgctacgacgtggatggaaatggaggtcattatgttaagtgaaataagccaagcacagaaagacaaatactgcatgttctcactcataagtggaatcttaaaaagtgactctcatgggccgtgcgcagcggctcacgcctgtaatcccaccactttgggaggctgaggtgggtggatcacgaagttaagagattgagcccatcctggccaacatggtaaaaccccatctctactaaaactacaaaaattagctgggcattgtgtcacaggcctgtaatctcagccactcaggaggctgaggcaggagaatcacttgaacctgggaggcggaggttgcagtgatctgagatcatgccactgcactccaacctggtgacagagcgagactctgtctcaaaaaaaaaaaaaaaaaaagtgactctcatgaagatagagagtagactggtggttaccagaggccaggaagggtaagatggaggataaaaggggaaaaaaatatatataaatatatttattagcactgaactgtacacgtaaaaatagtaaaggtggtaactttatatgtatattttacctaaaaattaaattaaaaaaagaggagagatctgaaatcaacctaatgggtagatttatcacaggaatacaagggcatttcaacataagaaaatctgtcaatcatgagtggaagcaacgaggaaagccatacaataatcttaattgatgcaggaaaagtgaccacattcaatacccattcatgttaaaaacactcagaaaactaagaatagaggtgaacttcctcaacatgataaaggccatttatggaaaacccacagctaaccttatattcaatggctgagtggtttccgcctaagattgggaacaaaataaggatgttcgctttcaccactactagtcaatattgttctagaactgctagtcagagcaattaggtaaaagaaagaaatagcacctaaattggaaaaagagtagaaaaactatatttgcaaatgacatgattctattttgaaaattccagagagtccacataaaaaccattatgttacaggaaagsggtcctgatccagaccccaagagagggttcttggatcttgtgcaagaaagaattcagggtgagtctgcagtgcaaagtaaaagcaagtttatttaaaaaagtaaaggaataaaagaatggctactctatagagcagccttgagtgctgctggttgcccatttttatggttatttcttgatgaaatgctaaacaaggggtggattattcatgcctcctctttttagaccatatagggtaacttcctgatgttgtcatggcatttgtaaactgtcatggcgctggtgggagtgtagcaatgaggatgaccagaggtcgctctcgttgccattttggttttggcaggttttgtctgactcctttactgcaacctgttttatcagcaaggtctttatgacctgtattttgtgctaatctcctatctcatcctgtgacttaraatgccttaacttgctgggttgcagcccagtaggtttcagcctcatttttacccagttcctatttaagatggagttgctccggttcacgtgcctctgacaattagacctaataaatgaattcagcaaggttgcaggatacaggatcaacacacaaaaacagtagcatttttctacaccagcaatgaacagtttaagaaggaaattaagaaatcctggccaggtgtggtgcatgcttctaatcacagctacttgggaggctgatgtgggaggatctcttgaacctgggaggctgaggctggactgatctgaggtcgtgccactgcactccagcctgggtgaaagagcctacaccctgtctcaaaaaaaaaaaaaaaatctttcattctatttacaatagcatccaaaagaataaattacctagtgtaaatcaaatgagcaaggagagtctcaatcattttaggaggtttatttgccacaggtaaggacatgcccaggaaagaatacagattcacaggaaaaattgtggtccatgctttttccaaagagggtctggggacttcagtattttaagggaaaagggcaagtattggtgaaagaggaagaaattttaaaagggcatgggtagataagaggcaaggggttgcattcttttgagtctttgattacccatatacatgtgaaaggggtagaagaatagtcacttacgcatctagctcattaaatctgcattttttaaataagataaacatagagcagaggaagcaatcagatatgcatttgtctcactcaggtgggcagagggatgactttgagttatgtccyttgtcccttacctgtgaagataagctatcaatttacattgtcagggtaaaagtcaacagaactgttttagggtaaagatcttggggcccacaagaaatttcctcgtgggcaaattgtgaaggaggtttatagcttttaaaaatctttgttatctgtcctatttaggaataaaattggaggcaggttcgtgtgactcagtttccaacttgacttttccctttggcttagtgagtttgggtcctaagatttactttcatttcacactagcaataactataaccaaggagattgtgaaaggaaaataaatcttggggccccaaactcactaagctaaagggaaaagtcaagctgggaactgcttagggcaaaccagcctcctactactcactctactcactaagataaatgcatatctgattgcctcctttggagaggctaatcaagttctaaagaatgcaaccatttgtctcttgtctacttatgacctgaatgtcccctccccatctccagttgtcccacctttgcttcaagttgtcctgcctttctggaccgaaccaatgttcatctcacatatgttgattgatgtcacatgtctccctaaaatgtatgaaaccaaactgtgctctgaccaccttgggcacatatcagaaccttctgatgctgtgtyacaggcacgcatcctcaactttggcagaataaactttctaaattaactgagacctgtctcagttagatattcagggttcacaaggtgaaagaaataaacactgaaagctataatacmttcctgaaagaaattaagacttaaataaatgtaaagacaccccatgttcatggattaaaagacttggtattgttaagccggcaattgtaaacaaagtaatgtacaaatttgatggtacccctcccagaattccaatggatgtgttttttgttttctcaaaaatagggaaagccaatctatgaattcatatgaaactacaaagtgcccccaacaatcttgaaaaagaacaaagtttgtatatttccccttcmtkatttcaaaacttattacaagtgggtttttattaacttgtcaagataattctatgtggaatgtgttgttgaaaagagtcaaactctgtaaaatattttaagagatttattctgagccaaatatgagtgaacatggcccatgacacagccctccggaggtcctgagggcatgtgcccaaagtggtcagagtgcagcttggttttatatattttagggaggcatgagacttaaatacatttaagaaatacattggtttggttcagaaaggcaggacaactcaaagcaggggcttccgggctataggtaaatttaaacattttctagttgacaattggttgagtgtatctgaagacatrggatcaacagaaaggaaatgttcaggttaagataaaggattgtggtgaccaagttttattgtgtagcggaagctctcagatagcggacttcagagagaacaggttgtaaaatgtttcttagtggacttaaacgtgttcctagctcttagttgattatctcctggatctgcaaaggaaggaaggmaaacaaaggggaaaagggaaaggggattctctacagaatgtgaatttttcccacaagagactttgcatgacaatttcaaggtatgacaaggaaatatattttggggtaaaacattttgattttcttccttgttatgacagagtcagattggaaagtaagtcatgatatacagggtttaataaaacccatctgatgagaatttttggtttgtagggcatgagtccccagaccccttatacaggaatttgggcaagataaaaaaaatcagagcttagtcatcaaatgagtaatcttttcaataaatggtgctaaaacaatcggatatctgtgtgggccaaaaaaataaaaaatcgtgttctcataccaatataaaatgtacttgaaatgggtaaagcctaaatataagaggtgaaactgtagaccttcaggaaaagtggatagaagattaacattaatgattttgatataaagatttcttagatataacatggaaaaaataggtcgagtgtggttgtacctgtaatctcaagtgctttgggaagctaaggtgggaggatcacctgaggccaggagttccagatcagtctgggcagcacagtgagaccctgtctctacaaaatcaaataaggaaaaaataaagaataaaaaagacagatcttcattaaaattggaagcttctgctcttcaaaagacaccattaagaaaatgaaaatggaagccacaaactgagaatattctcaatatatgtatctgataaaacagtatctgattagagtattgtatccagcatatataaagaattcttacaacttaacagtaagataacgcaataaaaaatggacagaagatttgaagagacacattaccaaagaaaaaatatggatgtctaggtagcacatgaacaatgttcaacatcattagtcatcagagaaatataagttttacatataataagaagccactacagtaggaaccattagaaggataaaatttaaaagacaataccaagtgctggggaggatgtggatatactggaaattttctgtgttgctcttggatatataagatgttataaccatactggagcattgttcagcagttccttttaagaatacatttaccatattacccaataattctaaccattctaatcatacatatatatgtatttctgttaggggggagatatatatttatatttatacattctaaccattctaatcatatgattagaattattagaatattattagaatggttggaacatatacataaaaatatatatatacatatatatayacacacacacacatatatatatgtatctccccccaagagaactgaaaatacatctccacacaagaacttatacatgaatacttaaagcaccattattcataacaggcccaaatgggaacatctcaaatgaccaccagttggtaaatgtataaacaaactgttgattaatgctactcaatttttttttaaaagctagctacctgaaaaaaatggatgaatctctaaagatttatgaaaagaaaggtaaaaacaatacattctgcactattccatttatgatattattgaaaaggaaaagcaaagcctgatacattttagactatattctgtttgatatcaaacatatgacatgctaggaaaaaaagcaaaagtatagtgacagaaacaaggtggataaattgtttttcaaagcctgaaggtgggtggactaagggcatttgctgcaaaatagcacatggaaacttttttgagatgatctaaaaaatacttatcttgattgtagttattgtaacataactatacattcatctaaaccccttgcactgtttaaagtggtgaattttattataaatgaatcatatctcaataggtgattaaaacattcgagatatctttcctgaaatagatgacttgaatgtacgtactgaaaggactcacaatgtacctggaaaattaacccaaacagtcagactgttccatgaaatagcttagtaaaacagactttaaagataatatatcctcccagtctccaggccaaaacattaaatcattttgaaagggtaaaaataatcaagttaacatcagatttcataccaacaaaagaacactggtgcagtgactacaaaatactcaaggaaaaaggggatgggccaaggattttatatctttccaagctgttctacatggtgtcaaatctggctttaaaaaaatatggccgatggctttaaaaaaattaggcatgatggcttatgcctgtaatcccaacactgtgggaggccaagatgggtgaatttcttgagctgaagatcagcttggacaacagagcaaaaccctgcctctactaaaaatacgaaaactagctgggtgtgcacatctgtagtcctggctacttgggagactgaggtgggaggatccttgaacctgggaggtcaaggctgcagtgagccatgatagtacctctgcattcccacctgggtgacagagcaagaccccgtctcaaaaaaaaaaaaaaaaaaaagccttggggaacagtgaacatatgcatcctaaggatgaaacacacaatataccaaaacataactagatgcagcaaaacagttctaagagggatgcttctcttataccatacaagcaagttaacttaaaatggattaaagacttaaacataaaactgtgaaactaaaactgctagaagtaaacaaagaggtaaaatttcttgccattggttttggcaatgagtttttagatttgatatcagaatcataggcaacaacaggaaaaataaagaaatgaaactacatgaaactaaaaagtttctgtactgcaaagaaaaaaaaaatcagcaaaatgaaaggcaaccaactgaatgagagaaaatatttgcaaaccatatagctgggaagggagtcaatatctaaaatatgtaaggaactcatacaactccatagcaaataaacaaccaaattttaaactgggcaagggaactgaataaacatctttccaaagaagatacacaaatgtccaacaggtatatggaaagatgcttgacattactaattatcaggaaaatgaaaatcaaagcacaaagagataacaccttacatctgttacgatacctactaaccaaaaagtcaaaaggtaacaagtggctggcaagaatgtgcataaaaggataccacttggggggaatgtaagctggtataggccctgtggaaaacagtataaaggtttctcaaaatattaaaaacaaaactatcatatggtccagaaatcctacttctaggtatatgtcaaaaggaaatgaaatcagtatcttgaagagacatctatactcatgctcattgcagcattattcacaacagttgagatacggaaacaacctaattttccctcaaaagttgaatggataaagaaatgagatacatatctatataatggaatattattcagcctttaaaaagaaggaaatcctgttacttacaacaatgtgaatgaacctagaggacattatgctaagtgagtaagccagacacaaaaagactccatgatctcacttacatgtgtaatcaaaaaaaagttgcactcatagtaatacagaataggatggtggttaccagaaagttagggaaatgaggcattctggaaaagaagagatgttaggcaaagggtacmaaaaaaattcagtcagccctgaaaaatttggatatttcacatttaaaatttttttaaatgaaaagacctttgggggaagggtaataatgaaaaaaattgagaaacattgatatacaaaaccagaataataaaattcagactaccaacttcatctacaaggcaaattaggaagttctgtgaggattagtcaatctctaattcttagcagaattaaatagaattcaaatacttacaaagttctattaatatcatctgtatctttcacttatattgcagtataatcaataaaagcaatgtacttgcaaaaaaaaagtgcggtatgtacataaatagagtatcattttgccttataaaataaaggaaattataacatggatgaacccggagcacattttgctgagtaaaataagccaggaacagaggacaaatatgacttattccactcatatgagaaatctaaagtcagactcatagaaacatggartagaatagttattgccmgggccagtgggagggggaacaacatgtgttagtcaaagagcacaaagtttcagatatgcaagatgagtaagacctagagatctaacgtacagtgtaatacctatcattaacaaatactgtactacatacttaaaaatttgctaatagggtacatcttaagtgttcttatcatgaaagtaaacaaattaagagggccaggcatggtggctcacgcctgtagcactttgggaggccaaggccagcagatggcttgacccaggagttcgagaccagcctggcaacatgacaaaaccccatctctacaaaagatacaaaaaattggccaggcacagtggtgtgtacctgtagccccagcctactcaggaggctgaggtgggagaatcacctgagcccaggagtttcaggctgcagtgagccatgactgctgtacttcagcctgggtgacagagtgagaccctgtgtcaaaaagaaaaagtaaaaattagaaaacagaataagaggaaatttttggaagtgatagatatgtttatggcattgagtgtggtaatgtgtctggaattggtgggttcttggtctcactgacttcaagaatgaagccgcggacgctcgcagtgagtgttacagttcttaaagatggtgtgtccagaatttgttccttcatggtcttgctgacttcaggagttaagccacagaccttcacagtgagtgttacagctcttaaaggcggcacgtccagagttgtttgttcctcccggtggatttgtggtctcgcggacttcaggagtgaagctgcagaccttcgcagtaagtgttaacagctcataaaggcagcgcggacccaaagagtgagcagctgcaagatttattgtgaagagcgaaagaacaaagcttccacagtgtggaaggggacccgagcaggttgccactgctggctcgggtggcctgcttttattcccttatctgggcccacccacatcctgctgattggtccattttacagagtgctgattggtccattttacagagagctgacgggtccgttttgacggagtgcttattggggtgtttacaaacctttagctagacacagagtgctggttggtgcatttacaatcctttagctagacagaaaagttctccaagtccccaaccaacccagaagcccagctggcttcacctctcaatcccctctctaaacaggacaccccaattgctgttgggaatttggccgatgactgctctagctatttcctgccggataggggcgaagaagggaccctgcagttgtagtgtccttcagaggggaactctttaggccagtggaagggccagcgggttggtccaggggtcctcagtagaagttgttagtcgaactcatttggggttccatttgtaagaccatctgtagcttgatggcctcgattctagaggaaacaaatttgacaaggaggttaaaaatacagggccccgaaggcaagtaataataagatggctgtcttgggacctagaaagrggagaagacrtgttgcccaactccagaggttggtttacgagtttgaaaggcrtctgatttcagaagccttttcctgtaaatgccgggcgatatctcatactgtccctgactggttagtrtaaaagcaacgttcttcccctaagaatgtgcaaagtcctcctttctcagcagtgaggaagtctaggcctcgggggttttggagagtcactgctgccagagtctatttgggattgtagagtaaggatagatttagttatttcttgcaaactgtctgagaaatcctttgagagtgtgtggtaataggataatgcatgttacactgttaagttttagcaaactttagttgaaaaccttttaagtttgggattttaatttttctttgatattaataaaacctcgttcagtccatattaacttagaattggtatagatggctccttcctgattctgtaagtactttaagatttggctgagtgcaaacaactcgcaggtttgagcagatcaattattaggcaattttcctaagtctgcttctacaagagtttccttatcacttactgaatacccattgtgtctttttcccttaatcgcctgggaggaaccatctattgtcctgtcctgaagggagttctgcccagatttggtcagaactttgtatggtaattaattaagatttagatcccctgttaggaaacctgttaggttaaggatttttgataggaaggctatgggttgtcagtggcctcagtgctttcaggctacacccttgttcacactgacaacaaggtggtattggagtgttgttacagggttacagagaagaccttcaattatcaattagaggttttaaatttacctggcttttaaaggaatagggtacactgttttttctttactacttccatctctctttctctttgacatcttcgtctctctttctgactccctctttgtctgtctcttcctctctctctctgactttcttctgttccttcctctctctctctgactttctgtctgtctccttctctttgacttcctatctttctctctctctgtctctctgtcacttcctctccctctctctctgtctctctgtctcttcctctctctgtctctttctctctttccttctttgactttgtctctttctttctgactccctcattgtctctccctacccctctctgtctctttctctctttcctttctgctggtctttccctttcccagttctaaggctcaggtaagtgccactagttctgctaactgggcgctggtccctcggggaagaggcttactttcaagtacagttacatcactaactatggtataacctgccctttgcatcccactctccacaaacgaacctccatcaacatataggttaaggtcaggattagccaaggggacctccaagagatcatctcgggcggcataagtctggactataatttgttggcagtcatgctcgattggttcctcatcctctgggagaaaagtggcagggttgagggccacgaacttatgtatttgaagcaccagtcsctcaaggagtagcgcctgttatctaagtaggcggttgtccgatagccataaactttttttagcacctagtamgccatttacatcatgagttgtccagacagtgagatcctttccttgtattattttgatagcctctgacactaagacagccaccgctgcaactacctgtaaacagtgaggtcaaccttttgctactacatcaatttccttacttaggtatgccactggttgtggggttgtcccacgagtctgagtaaggactccaagagctatccgtgctctctctctgacatataaagagaagttttgtcctgtgggaaggcttaaagctggagcttcagtttgttccttccactgcccagacttcagggttgattttcttttcaagtaaggggcaacaaatgggtaacttgttccccatattcgtgtagctaatagctccagctttggctaatatatccctccctaataagggtatgggactttcaggcataacaagaaaggcatgtgaaaagagcaaagtctatcaattacaactgaggaggtgggagaaatacctggttacaggctgtcccaggatttctcggacggtaacggaccttgaggacagtcatctgggacagaaggttaacactgagaaggccacaccagtgtccaggaggaagtcaattttctggccctcaatggttaaccatacctggggctcagtgagggtgatgacatgagctggcgctttcccgaggcaccctcagtcctattgttggatcatctggttgggggcttttttctggcccagagaaccattgcactctgggacagtgtgccttccagtgattgcctcagcatagcggacatggacgagggggtggcttgtttctcattgggcaatcttttttaaagtgtccttgtaaaccacactgataacaagccctaccagatgattggcctgctccattttctgttctctctgaaccaccaaggtttgtttgtctgagggccatgacaaaggctgcagcatttctctgatcttgcttttccttttgggcctgttcctcttcatccctattatagaacmccgaggttgccaggtttaataatgcctccagattttgtttagggcctggggcttgcttttggagctttctcctgatatctgcagctgattgggtaataaacttatcttttagaatcaattgaccctcaagtgattcaggtgatgggagtatattttcttaaggcctcctgtagccacttgaggaaagcagaaggattttcttcctttccctgagttatggtggacatcattgaataattcatgggctttttcctaattctccttagtccttctagaacacaggtcaacagatgtttgtgactccagtccctatgatctgagttgaggtcccagtggggatccatactggggacagcttgctgaccagtagggaattttccctttctttggctgtcattttatcatttacttgactaagatgccaggtatctccaaactcttgggctgcagctaaagctgcattcttttcattaaaggccagggtttgatctaacaaaagcatgacatctttccaagtgagatcgaaggtttcccctagaccctgtaggacatctatgtacctatcaggatcatctgaaaactttcccaggtctgccttgatctgctttaaatcagagagggagaaggggacatgtacctgggttgggccaaattccccttcccctacagcttgaaggggacgtaaccgatagcccgggggtttttgtggtcctttggagatttctttgcttatttccttctgggcaggggagattagaggaggcttatcattaataggagggggagccatagggaggctaggatatgggactaagctgaaaggtcctcctgggggatgtaaattgcaagctttgcatagtcatgtattctccttcaatgaaaagagtttggacataaggtatttcactccatttgccttccctcttacagaaaaggtcaagctgcaggatagtattgtaatttatacttccctcaggtggccatttttccccatcagagagagaatattggggccaggctgtagggcagaaaaaaatgagccgcctctttttcagggtttgtgggtcaaattggtcccaatggcttaggatgcatttcaaaggtgagcctgttgatgcctgagtgtttcccatctgaaagacaaaaccacctgtggttttggtttgttttgtttctcccccacccacaaacctgcaacggtccctggaccctgctgatcggaatagttgtgctccctgacgcagcagcaaaaatactagttttcctcccagaccacaagggggactgagaaaggtcggatttagtggcccttaccaacgcattctcgaaaacctgcacccttgcctgtcctcctagaccacaaagaggaccgagaaaaatcggatttagtggcccttaccgacacattctcgaaaacccattagagtcctaagcattcacctgttagtattgggaccttaaccatgtcctataaagatgttatgccccccaaatgaagtggagtgccataccctgagggagggaagggatgtccagggttggaagagtgacaccttttgtccttacttatatgaataggaaggatacaatttctgaggctccccatattctagcttcaggaatagcttttgttaggcctgctagtctgaggagggatcctaaaattccagatagtcccccctacgatggggctttgggcaaaaattacgtctttctgattggtgagcctgggtgcctacagaaggtaacagaatcccaaatttatactagaaatcattcttataggagaaactagaaaagcaccagagacagggagtggtttttagaagcaggactagcctggagaagagaggcaaggggaagtttgtctggcaggcgttaggacccagggggcaatggtcagggtagatagaatagatgggcaagtctcgcttgggcgacatgactttgagagttccactcatggccacagggtcaaccaacttgttgttgggaccccggagctgaatggctttcctctctgtcgaccctgggctcagcccagaagtacaggaaaagcggaagctggttccaggcaaaccaacgctaccaactctgaagagtcagggattgttagaaaggcctttcccagaaagcctgacacctgtgtctttagtctggcagctgcgctagtagcttttaactggccgacaggtgcctggtatttagmccccgaattctaaggaaaaataggaaagaatagcaagcgaaaggggtccgatggtactcaccacttggcaataggcgatagtctcacttcttggcgataggcgatggtcccatctgggtcgccaaaatgtgtctggaattggtgggttcttggtctcggtgacttcaagaatgaagctgtggacccttgcggtgagtgttacagttcttaaagatggtgtgtccggagtttgttccttctgatgttcagacatgtccagactttcttcttctggtgggttcatggtctcgctgacttcaggagtgaagccgcagaccttcgcagtgagtgctacagctcttaaaggtggcacatctggaggtgtttcttcctcccagtgggttcatggtctcactgacttcaggagtgawgctgcagaccttcacggtgagtgttacagctcataaaggcagcacggacccaaagagtgagcagcagcaagatttattgtgaagagcgaaagaacaaagcttccacagcatggaaggggacccgagcgggttgccactgctggctcaggtggcctgcttttattcccttatctgggcccacccacatcctgctgattggtccattttacagagtgctgattggtccattttacagagagctgattggtccattttgacagagtgatgactggtgcatttacaaacctttagctagacacaaagtgctgattggtgcatttacaatcctttagctagacagaaaagttctccaagccccctacctgttagctagacacagagtgctgattggtgcatttacaattctttagctagacagaaaagttctccaagtccccacccaacccagaaacccagctggcttcacctctcagtaatagcttcagtggtgtctacttccctccaaattaatcaagttgtatacattaaatatgtacagctttttttgtgccaataatacctcagtaaagtgatatgtaaaaagaagacaatagaaataaagaaaaaggagctcaagagaattacattaattatacatacttgagtttataaaaatgtaaacattcctatatacaaaacaaatatgaaatcaaaacaattttttaaaaagtaaagcaaagttgccatatggcaaaaaatacaaacgaagcagggattgttatatactgtataacaagacagaattatgccacagattattaaacagaacaaagaaagtcactctacaatgctgtgggctacctttcataataaaaaaaagttatatccgtgtaccaaataaaatgataggaatcttcataaagcagaaattgtaggagatacaagaagaaacagacaaaagcaaaccagtagttaatttgcacgtaacattttcagtctaagatgggccagaatgacaaaaatgaggaaataaatcagcaaagtaacaataaggagctctcatgtgggtggatacatmcacacacacacacacacacacagagtgtatatatatgtctatacacacaaagtacatatcaaaatgtatatatatatatatactctgataatagagacacacttcagtacttcagactgatattgttctataatatcagttacatgaatatagagatcatctattactttatttgtttaactttccatttgtttatcttgctgattgaggtgtgctaaaagcaactgttaatataattgtcttctttatttctgtcaccttttttttgtttcatatatttaagacactcacagtcatgattgttgggtcttcctgatgaattggtgtttttatcattatgaaatgtccctcctttaatactgttttttaaagtatattatatctgataattattgccattctagccttttcatatttacatttttctatttatgtactttcaaactatctgtgtttgtatatttatagtggacttcttacaaacagcatatatttggttcttgctcttttatgacagtctttgtcttttaattgaaatgttcagttcattaacatttaatgtaattatggatgtagttgcaattcagtctgtcattttgttttttgtttgtactaatttttgtttcttcactcctcttttccttccttctttggattattttaatattttccagattttttatttatttgctttttcagtcatacctacttgcactgtttttttagtggtgctgtaagggttacatttatatccttagtgttctacagtccacttagaattaaaatgtagaaatcttcatgcagtccacttcatggaaaatgtagaaatcttgcaatgaactgtatcagttcatttacccaccttaccccatcctttatgctattgtataacctacatgttacaaccctcacaaaatgttataatttttgctttcaacagactagtgtatattaaataaaggtaatggagttctttatatttgcccaggtatttactgtttctcytacttttcattctttcttgaagatctgcatttccatctmgcatttattttagcctaaagagcttcttttagtctttcttacggtgtagttctacttgtgataaattttcttggtttcttcctgcaaatgtctttattacaccttcatttgtgaaagagtctttgctgcatataaaattttttgtgtgtttcttccttccagtacttcaaacatgttattccactgccttcttgagattattctgctattgtttttttaaattattaagttggatgtttagtttatcaatttttaaccttcttttcaatataagcatgtaaggctatagatttcccttcaaatacctcatttgctcaagtttttttatagtattagcatttatttaagtattttaaaatttctattatgatttcttctttgactaatgacttcatttctaagtacatgtgcatatattgcttatctttttgtcaattaattacattgttgatggattaattataatgtttaaaatgtattgagacatgcttttttacttactacataatataattttgtagatatcccatttgtgcttaagaagaatgtgtattctctgatttaagatttaaagttctctgggccaggcacagtggcctgtaatcccagcactttgggaggctgaggcgggtggatcacgaggtcaggagatggagaccatcctggctaacacagtgaaaccccatctctactaaaaatacaaaaaattagccaggcgcggtagtgggcccctgtagtcccagctacttgggaggctgaggcaggagaatggtgtgaacccaggaggtggttctctgatttaagttctgtgtatccaataaatataactttgtaattatgttgtttaagactcctgtttctttctaatttactcaatgcttagactagcaaaaatttagagataacccttagtctcacacagtgatggtagtctgatcatttgttttaattctattcatgttttgctttatacatttttgagcctattttattaagtacattcaagtttagaatttttgtatatacagaagattgaaactaggccccttcctttcactgtatacaaaaattaactgaagatggattagagacttaaatgtaaaacctacaactataaaacccttagaagaaaacctaggaaatattgttctggacataggctctgacaaagacatcatgacaaagactccacaagcaattgcaacaaaaacaaaaatcgacaaattggaggagtcgctgcacaaagacttgatgcttatttttcctccataatttgaagatattttctgtcttctacctcccattgttgccaatgagaagtctagggtcagtctatttgtagttcctttttagatgatatgtcttctctctggcagctttttctttttttaaactttatgtataagttattctttttttcttgcacttttagggtcaagggtacatcagccggtttgttacaagggtaaattgcatgtcatgggggtctggtgtacagcttatttcatcacccagaataactatgctactaatgagcatagtattcgataggtactttttcaattcaccctcctcccacactccagcctcaagtaggccttggtatctactgttaccttctttgtgtccctgtgtactcagtgtttagttcccacttataagagagaacatggggtatttggttttttggtcctgtattaattctcttaggatagtggccaccaactccacccatgttgctgcaaaggacaatctctttcttttatatgactgcatagtattccatggtgtatatataccacattttctttatcctgtcaaccactgatgagcatctaggttgattccatgtccttcctattgtgaatagtgctgtgatgaacatacacwtcacatatctttatgttagaacaatttatattcctttgggtatatactcagtaatgggattgctgggttgaatagtagttctgttttaagttctttgagaaatctccaaactgctttccacagtggctgaactaatttacattgccagtaggggtgtataagtgttcttttttctctgcacccttgccagcatctgttgttttctgactttttaataatagccattctgactggttatgagatggtatctcattgtggttttgattcacatttctctaacgattagtgatgctgaggatttttccatatgcttgttggctgagtgtcttattttgagaagtgtctgttcatgtcctttccctattttttaatggggttttaagttttttgcctgttaatttgtttaaattctttatagattctggatattagacctttgccaaatgcatagtttgtgaatattttctcccattctgtaggttctctgtttacttttttgatagtttcttttgttatgcagaagttctttagtttaattggtctttccattcatgaattttttgtttttgttgcagttgcttgtggagtctctgtcatgacatctttgccagggcctatgtccataatgatatttcctaggttttcttctaaaggtttttatagttttgggttttacatttaagtctgtagttcatcttgaatcgatttttgtatacagtgaaaggaaggggcgtagtttcaatcatctgtatacgactatccagttactccagcaccatttattaaataggaagtcatttccccattgctgctgttgtctatcttgtcaaagatcagatggttggttgcaggtgtttggctttatttctaagttctctaatctgttttattggtttatgtgtctgtttttgtaccagtaccatgctgcttagtttactgtagctttgtaggagttcgaagtgcataacctgatgcctccaactttgttctttttgcttagaattgctttgggtgttcaggctttttttggttccatataatttttttttttttttttgagatgtagtttcacttttgttgcccaggctggagtgcaatggtgcgatcttggctcactgcaacctctgcctcccagattcaagctattcttctgcctcagcttcccaagtagctgggattacaggtgcccgccaccacgcccagctaatgttttgtattgtttttttaagtagtgctgggattacaggtatgagccaccatgcctggcctggttccatataaatctaaggtttttctagttctgtgaaaaatgtcagtagtagttggataggaataacattgaatctgtagtatggccattttaacggtattgattcttattatccatgagcatgaaatggttttccaattgtttatgtcatctctaatttctttccacagtgttttgtaattctcattgtagagatctttcacctccctggttagctgtattcctgcttattttattctttttgtggctattgtgaatggaattgcattcttgatttggctctcagyttggacattattggtgtatagaaatgcaactcattttgcactaattttgtatcctgcaactttgccaaagctgtgtatcagatctaggagtctttgggcagagactatgggattttgyaggtatagaatcttatcatctgagaagggagatagtttgacttcctctcttcctatttattaatagatgccttttatttcttttctggaagcttttagttttttttcttttatttttatttatttatttatttattttgaggcagagactcactctcttgcccaggctggaatgcagtggcacaatctcagctcactgcaacctctgyctcccaggttcaagtaatccttgtgcctcagcctcctgagtagctgggaatacaggcacccaccaccatatctggctcagttttgtatttttagtagaggtggggttttactatgttgcccaggctggtcttgaacttttagcctcaagtgataaaatccatctcggcctcccagagtgctgggattataggcgcccggccttattttctttttttgtttagttctgcatttccattacaaatgtggatattttaaatttcctttttatatctcctgcctgatatacattgtttcttttgtgttgattgtctcatatcatttatcatctctggaaattcttagccattaacttaattccctgtgtagtcatattagactttttcattttctgtaatttgctcagcctctctttatatttttaatctctttttcctctgtgtaacattctgtgtaattcctgacttatacataatttatgcacttttatttcaccaattctttcttcaaatgtgtcaaattgactgagcacagtggcttacacctgtagtcccagcattttgggaggctgaggcaggaagatcactcgagctcatggattcaaaaccagcctgggcaacataatgagacctcatttctacaaaaaaaaaaaagtattaccccagaacgtggcacatgcttgtagtcacagctgcttaggagactcaaggtcttctaagacactcgaggtacttatgaggttgatgttacagtgagctataatcacgccgctgtactccagcttgggtaacagagcaagacccagtccaaaacaaaaaaaaaatcaaattatttaacttcaataattagatttttatttctaaaagttctgttttattctttaaaatagtaacctgattattctttattgtatcatattacatgcttattttcatgactccctcatttctttaaatattttatattgaattattttatatgcctactgtaataattcaattatttgaaatccatggagatctaaatttgttatttttctaatttttagttatagtgccttgttttcttgtgtttttgattatctttatgaactcatacttgtttgattttaatttatgttaattttatgttaaaaaatcattgagggcctctattagaaaggctttaatccagacatgaatttgtttgtttctgtgaaagttaggggcactactaayctgggtctcttttagcccctggcttaatcagaattcttgggtttagctcttttacttgccttaatcaacagtctgagcttatcacctttaacttgagttttgttcaggcttatctcctaagggtgatggccctgtaagtagttctgccctgtttttcccccttatttgttgtctgctgagtgatccttactctgatttctatcaagggattttgtttaattggttatttttttatggaggatatggcccccttggtatttacttacttttcatagtcctatgatttactttaactaagtattttataaacaagctagttgggagtctccttttgttatttctgtttcaccatgctgccagatgccaatgtcagttttttaattttaccatgtatcattaccatctactgtctatcattacctcttacctagaaagaagagcacatcctaacttatcccccttaatttcactctctccaatttcagtttgccctctatgattgccaaattgatgtttcagtgaacatgttagacatgttaactttgaggtgccttgaaataataatttggagatcagggaagagatggatcccggaggtgtagatttgtaagccactgataattgataagcaatgccctgggtgtggtaaggttattgaggagattggagacagtgggtagaaataaaagaggatcatagaatactgatttcatggggaggcagagaaaaatgaactagcaaaggagactaagaacacatctaaggaagggaaaacaaaaaattaaggaaagcagggcaagccaaggtaggagagggtttcaaggaagggcaatttatagaattagatgggaccaaaggggcacaaaaggtaagaatttacctttaagtttgatcctaagaagatggatgacaatggctcaggcctataatcccagcacttttgggacgctgaagtgggtggtttgcttgagcccatgaatttgagaccagcctgggcaacatggcaaaaactccatctctacaaaaaatacaaaaaattagctgggcatagtggcgtgcacctgtagtcccagctacttggcggggctgaagtgggaagatcatctgagcccaggaggtcaaggcgatgattgcaccactgcactccagcctgggtgacagagtgagaccctgtattaaaaaaaaagaagatggggccaggcacagtggctcacgcctgtaatcgcagcactttgggaggctgaggcaggcggatcatgaggtcaagagatcaagaccatcctggccaatatggtgaatcaccatctctactaaaaatacaaaaattagctgggcatggtggtgcgcgcctactcccagctatcgggaggctgaggcaggagaatcacttgaatcagggaggtggaggttgcagtgagccgagatcatgcccctgcactccagcctggtgacagagcgagactccatctccaaaaaaaaaaaaaaaaatatatatatatatacacacacacatatatatatatatayacacacacatatatatatatatatatatgtatgaataattagtattgccagatagttacaatggaatggggacaaatgcaaaactgcagtgaatgcatggacaaatagtacaatttgctaatcctctgacctcttccttagtatatcccatctccactgaatatataatgaatcaataagcttcctagtacaagacactcttcattcacaaaataaacacaattgccttttgatttctatagctgagagggattcaggcaaatataggaggtactaacaagaagaggcaacgtattttctaagctatcayagtcagcagtgtctacttggggttatgtttattcttgaaagttatacttaaggcctccacaggctctgcgcctcagcccctcctaaatgtaataactttgcacatatggaagatcctagtaggccaaatcccttctgtttgaaaatatttttccaatcagaaggacaaaaacagtatcacagawatatgttaaataaacagctcttttcttttatatattcttgttcacaactaacataatatttttttctgccttgtaggtaccagaggtttgaaaaggcatttctcctagctgttgacgttggtgctcgtgacctctttatggtgagtcattttcagagatgattttgtgccttcagttctaaggctaagttgtcagcttytgtgaccataaaaaggattactgtcattttgcagccttagacacagggtgggaaagcattattccatcttgacttgcaggtttgctttcgtgaaactggtcaataaccatctaatatcttttgatttgttgacattttgtttgctggctccaatggatcttttgtgttttctaagaatttataattcttgaacttttctcctcatgtaccttgatgcaaggggatgacacctatctatctagtaagcttaaatgtctttctaatccattctctgaagaaaagctatagaatccaggacatagggcaaaagatgtcccacagatctcgaatgtgctcagtttgtcccttatattttagtgtagagtaacaaagcaggaatgttctcacatgtattttttaagtaaccatagtacaaagtggatccaagaggttaaattcatgtacactctggccctcccatttattagctacagaacagtaaaactgaccagtttcttacaaatccttgtactctgtatcaggtttctgttttataagatcttgcactacagtgccacattgagatcaaatgaacaaaggaaaagtcctttcctcgtttcccagcatattctgttagacagcaatttcattgtttccacagaaacaacagagcaaaaggttcttgaaagaagaaatacttctagaaggtgcttttgcctgaatcttttgcacaattaagacattttgtagtttaaattaagctttgatgtttcagatattctgttatacagcaatttcattgttgtcacagaaacaataaatcaaaagcctcttgaaagccagaaatacttctggaaggtgcttttcctgaatcttttgcacagtgaagacattttgtagtttaaatgaagctttgatgttttagataatattatggattcatcacattagatcaatcatctttggattgagtttgatatttaaattctaaatgtatgtcattcaattaattatactattattgatcataaaaaatctaatttcaaaagtgtgaacattctattgttcgtcatctgcattttgtgatgtctgattgagcaggcatatgacattgagggaagattttattattttcatcaaaatctatacatgcagagatcacagtgtcagaaaattaattacactttttagattttccagccccattgacttttttccttatctccaccttttcacctttgccacttaccccaataatggtagattttccccacatttctttattttttatgtctatagtttcagtcttttttctagccaagataagaactaaagagatgaatatttaaatgtttggtgcctggtaaaatttctctctcaaggtattatgttctttaatttctaatgttgtaataattaatagaaacatcacgaaaggcaccttctaaacttttctcaaatcatatctctttcagctttcggtctcagtttagccaataacaatataaagtgtccatgttagttcaaatcaccttcatccagtagcctttctactgataggctaatcctaaaccatgakgatttttacacataaaagatgaaaatctaaaataagggaagtatagaagtggttttactgtcctttttatttgcaaaagcaaacagtcattattcagawtgctgcattgttactcttcatacataactttattgatagcccaaggtctgctttaaagaagctcaaaatattgagagcattaaagcctcagagttctatttaagctcatgaatctactatatacatttaargttccatgtagaaattgcctaaaaggatttatttttttaatagattcattcttactatctaaatttcatctagccagaggtctatagcctatagattgaaaaatgttacctcttttgaaattaaaagcttgtagattaaacaggattattcctatttatacatgattttctacccttgagatatctcttgctaaaagactaaaaataataacatatgaatcacaatgggatcacacaaaggtgtatcagttaacctgaaaatagtcctttttgcattagcatattatcagtggtaaaaagttacaaggcatacaacatgataagaaagttgatatggctggaaagcagagagactaaaggggcttacattccatataaaggagttagaatttatctcaaaagcaataggaagttactaaatcattttaaatagaagagtgatattatcagtattttggctaggaaacttttcctctaaagggccaggtagcaaatagtttaggcttgcttgcttgcttgctttattgattcattcattgattgagacagggtcttggtttttcacttaggttggaatgcagtsgtgtgatcatagctcactataaccttgaactcctgggctcaagcaatcctcctatcttagcctccaaaggagctaagactacaggcatgtgccaccatgcttggcttagttttgcaaatatttttttgcaaaaaaatatgactttttacaagccatacgggctctgttgcatctacttaattctgccattatagagcaaaagcaggcatagtcaataaatacagaaataagtttggctgtgttccaataaaagttcatatatggacactgaaatttgatgtcacataaaattgttcctgtgatttttttttttccaaaaaccattcttagcttgggttagacttggatggcaggtcacagtttgctgattycttgtttagagtatgatcacttaaggctgcattgtagawaataaactgaaacgagacaaggctcctaggtacaagtgtgaagtaaacaaagaggtgggttctttcaggcccatttcctcaggtccagcaacctcatagtaattttcttatatttaaggcctgttgattcaactccaagctctctcagttattagctgcataattttgtataatttacctaactttgcttgctttcattttattacctgtggtgatgataatgcataaatccctagtgtgctttaagtatcaaatgaattaataatatatatgaagtgcctggcatattgtaatgacttaagaactacagttctagtatatattttatattactcacttttcaaatatttaggtagtacttcactttacattgtttatacatttgtcagattaacaatgctggaatttaggtagctattgatatttgggtgtttaaaaacaagtagtctctacctgaaagattggaattgaatcaaggcagcctagtttcagagtacatactctgtgttttcatttttatttgtctctaagggaaattttctaatttcccttgtggtttcttttttaatccattagttgtctgagtgtgttatttacatgatttccagaaactggggtttttttttgttttaattctgttattgatttgtaacttcatcccattgtgatgggagaagatactttgatgtctatcgttttaaatctattgaaacttagtttatcctagaaaatgtcttatatagacatgagaataatgtgtatgttttggggaagaatattttgtatttgtacaactagttgatttattgtgttgtttaagacttctgtttccttctgtctggttttctagcaattattaagagtacggtattgaagtctccaactactattgtagactatttctcacttcaattctgtttggtttattttaagagacagggtctcactatgttgctcagactggacttgaaccctttggtttatgcaatcctgccacatcagcctcccaagtagctgggattacaggcatgcaccaccgtacccctcctgtcagtttttgcttcatatatttgatgatacggtattaggtacataaatgttaattattgttatttttcttgctgtatttaaatttgcatcagtatatgccatcttttaactttttttagttttacattcagaagtacatggacaggtttgtcacatggatacactgagtaatggtgaggattgggcttgtggtgtaccccttatccaaataataaacattgtatccaataggtaaatttctaacccttactcctctaccaactttggagtccccagtgtctgttatttccatctttatgtccatgtgtacccaatatttagctcacacttataagagagaatatgtggtgtttgattacctcagttactacaactaggataatgttctcaaactccatccatgttgctgcaaaggacatgatgtcattcttttttatggctgaacagtatttcatgatgtatatttaccacattttctttgattatactttaggttcttggacacatgtgcggaacatgcaggtttgtcacatagstatacatgtgccattggttttctgcacccatcaacccatcatctacattagttatttctcctaatgctgtctctcccctagcccccgaccccctgacaggcctcagtgtgtgatgttcccctccctgtgtccatgtgttctcactcttcagctcccacttatgagtgagaacatgtgctatttggttttctgttcctgtgttagcttgctgagaatgatggtttccagcttcatccatgtccctgcaaaggacatgaactcatccttttttatggctgcatagtattccatggtgtatatgtgccacattttctttatccagtctatcactgataggcatttgggttggttccaagtctttgctattgtgaatactgctacaataaacatacgtgtgcatatgtctttatagtagaatgatttataatcctttgggtatatacccagtaatgggattgctggatcacatgttatttctagttctacatccctgaggaattgccacactgtctcccacaatggttgaactaatttgtgctctcaccaacagcgttaaaacgtttctatttctccacatcctctccagcatctgttgtcctgagtttttaatgatcaccattctaactggcgtgagatggtatctcattgtgggtctgatttgcatttctctaatgaccagtgatgatgagctttttttcatatgtttgttgctgcataaatgtcttcttttgagaagtgtctgttcatattctttgcccactttttgatggggttgtttgtttgttttcttgtacatttgtttaagttctttgtttaatttctttgtgtttaagttcttggtagattagccctttgtcagatggatacattgcaaaaattttctcccattttgtaggttgcctgtttactctgatgatagtttcttttgctgtggagaagctctttagtgtagttagatcccgtttgtcaatttcggcttttgttgccattgcttttgatgttttagtcatgaagtctttgcccatgcctgtgtcctgaatggtattgcctaggttttcttctagggtttttatggttttaggtcttacatttaaatggttaatccatcttgagttaatttttgtataaggggtccagtttcagttttctgcacatagctagccaattttcccaacaccatttattaaaaagggaatcctttccccattgcttgtttttgtcaggtttgtcaaagatcaaatgrttgtagatgtgtggcattatttctgaggcctctgttccatttgcctatatatctgtttttggtaccagtaccacgctgttttgtttaccgtagacttgtagtatagtttgaagtcaggtagcatggtgcctccagctttgttctttttgcttaggattgtcttggcaatgtgggctcttttttgattccatataaaatttaaagtagttttttttctaattctgtgaagaaagtcaatggtagcttgatggggatagcattgagtctataaattattttgggcagtatagccattttcatgatattgattcttcctatccatgagcatggaatattttccatttgtttgtgtcctctcttatttccttgagcagtggtttgtagttctccttgaagaggtccttcacattccttgtcagttgtattctgaggtattttattctctttgtagcaattatgaatgggagttcactcatgatttagctctctgtctgttattggtgtataagaatgcttgtgatttttgcacattgattttgtatcccgagactttgctgaagttgcttatcagcttaaggagattttgggctgagacgatggggttttctaaatatacaatcatgtcatctgcaaacagagacaatttaacttcctctcttcctatttgattgccctttatttctttctcttgcctgattgccctggccagaacttccatcactatgttgaataggagtgctgagagagggcatccctgtcttgtgctggttttcaaagggaatgcttctatcttttgcccattcagtatgatactggctgtgggtttgtcatagatcggtcttattattttgggctatgttccatcaatacctagtttattgagagtttttagcatgaagtggtgttgaattttatggaaggccttttctgcatctattgtgataatcatgtggtttttgtcattggttctgtttatgtgatggattacgtttatttatttgcatatgtggaaccagccttgcatcccagggataaagctgacttgatcatggtggacaaagctttttgatatgctgccagagtcagtttgcgagtattttattgaggatttttacattgatttccatcagggatattgggctgaaattttctttttttgttgtgactctgccaggtgttggaatcaggttgatgctggcctcataaaatgagttagggaggagtccctctttttctattgtttggaatagtttcagaaggaatggtaccagctcctctttgtacctctggtagaattcggctgtgaatctgtctggtcctgggctttttttggttggtaggctattaattactgcctcaatttcagaacttgttattggtctattcaggkattcaacttcttcctggtttagtcttgggagggtgtacgtgtccaggaatttgtctatttcttctagattttctagttgatttgcakagaggtgtttatagtattctctgatggtagtttgtatttctgtgatcattggtggtatcccctttatcattttttattgtgtctatttgattcttctctattttctttattagtcwggctagcagtctatgtattttgttaatcttttcaaataggtcctggattcattgatttttgaagggtcatttgtgtctctatctccttcagtatgctttgtgaagttcttgtgctgtatttttcatctccatcaggtcatttatgttcttctctaaactggttattctagttagcaattcctctaactttttttcaaggttcttagcttccttgcattgggttagaacatgctccttgagctcggtggagtttgttattacccaccttctgaagcctactgtcaattcgtctcactcattctccatccagttttgttcccttgctggcaaggagctgtgatcctttggaggagaagcagctttcttgtttttggaattttcagcctttttgccctggtttttcctcatctttgtggatttatctacctttggtctttgatgctggtgacctttggatggggtttttgtgtggacgtcttttttgttgatgttgatgctatttctttctgtttgttagttttccttctagtagtcaggcccttctactgcaggtctgctggagtttgcctgggtatcaccagcagaggctgcagaacagcaaagatcgctgcctgttccttcgtcccagaggggcatctgtcagatgccagccggagctctcttgtatgaggtgtctattgacccctgctgggagatgtctcccagtcaggagtcacgggggtcaggggcacacttgaggaggcagtctgtcccttagagcttgagtgctgtgctgggagatccactgctctcttcagagctagcaggcaggaatgtttaagtctgctgaagctgtgcccaaagtcgccctttcccccaggtgctctgtcccagggaggtgggagttttatctataagcccctgactggggctgctgcctttctctcagagatgccctgcccagagaggaggaatctagggaggcagtctggctaccgcggctttgctgatctgtggtgggctcttcccattttgaacctcctggcagctttgtttacaacgtgaggggaaaactgcctactcaagcctcaataatggtggatgccgctctccccaccaggctcgagtgtcccaggtggacttcaaactgctgtgctggcaagaatttcaagctagtagatcttagcttgctgggctccatgggggtgggatccgctgagctagaccacctggctccctgccttcagccccctttccagggaagtaaacggttgtgtctcactggcattccaggcaccactggggtatgaaaaaaaactcctgcagctagctcggtgtcttcccaaacagccaccaagttttgtgcttgaaacccagggccctggtggtgtaggcacccgagggaatctcctggtctgcaagttgcgaaaaccatgggaaaagtgtagtatctgggcctaaatgcactgttcctcacggtacagtccctcacagcacagtccctcacagcttcccttggctaggggagggagttccccgaccccttgtgcttcccatgtgaggcgatgccccaccctgcttcagctcgccttctgtgggctgcacccaccatctaaccagtctcaatttgatgaatcaggtacctcagttggaaatgcagaaatcacccaccttctgtgttgatctcactgggagctgcagactggagctgttccaattcagccatcttgccagccacccatatgtcacattttctttatacaatcaaccattgatgaagacttcagttgattccatgactttactattgtgaataatactgcaataaacatatgagtgcaagtgtcttttttatataataatttattttcctttgggtagatgcccagttgtgggattgctgggttgaatggtagttttatttttagttctttgtaaaacatctatactgttttttatagaagtagtactaattcacattcccaccaacagtgtacaagggctccctttactccacatccctgcctacatctgttttttttttttttttttgactttttactaatagccattctgagtcatgtaagatgaaatgtcagtgtggttttaattttaatttctctgataattagtgatgttgagcattttttcatatgtttattgactgcttatatgttttcttttgagaaatgtctatctcttttgcccacttttaatgggattgtttgttcttttctcttgctgggttgtttaccaaggccttctttagcattcccattgccccagagagccaagaccaatatgcattcatctgggaaaagagaacggtgaatctttaccgtgttgcccctggtatttttacttagccccactgtctgttgtggccaaaaggcctccaacctcagtcagtggaccactccagaggggtatgtgttttccattatactgatgatatcatgctaacttctgagtctttttctagcttagaaactgcagccccaaccttgctgtcttacttgacctacagaggtacaatgggtggtcaatgcaaagtccagggtccaggcgtatcagtcaaatacctgggtgtcatctagtggggtgagactaaatttattcagtctaccattatagaataaggtaaaggccaacccacgtcctaccacaccagagcagctgcaaaccttcttaggccttctagggtattgatgtccttttatttccccatttggtacaactccttaggcccctagatggcttagtcaagaaggagggccactggaactggtccacaaaggaggatgtggccttgaacaagctaaaatcgcagtgaaataaatgcaggccttggaagttatagtgcagggatagccttgtaaattggaggtagccagttactctgaggggcttgggtggggcctgtaggaaacacacggacatatacatgtgcctttaggattctggtaccatctattgaagtggctactttggggtatataccctgaccccactcagaaaactggcttctgattttgtggccctcacccaggaactgacttagcacaagaagatagtcaccattgtaaaatggcagagactaaaacaaaatattgccatgtgtttacaggtcatgttcccaaggacatgaaacaagatggaggcctgtagccaagtttgttactgatcattttgttgggctggcttgaacagcagtcgtatggggtcctgggtctacatcttaacctaaagtaccctttcttctgacagaaccatacagaaagacacayaaagcacacmagagtgtctacagcttgacaccaacctcacaaatcctttttcattaaaactttacagagaatattagcaattatccttatttatcccttttaccaatttgcacagggagagagaagccaaaagcccaactggtaagaaatttttacccttttgttggcatgtcaggcttctgggttcccttcctcctagctcaactctaagccaagcattttaatggttgggaaattaatttttccaaagttggaagaacattataaaagagaagccattttaaaccatgaaagaaggaaaaacaccatagaaaagtctggtagtttcaattaagattgtgaacaggtatttcctatcctactgkgaatggtatttgctgtatttcttccccttttctattttctcttttctcttttggcccactataggagacatattgctcatctttgatattctctgatgcttgcagagctgcctgcttctcagctgtggttagggtttggcttaggagcagcctaacatccttctatgagaggtcaaatacatgagttaaattttggaaagcttctatatacctatcagagtcgttagaaaattgacctaagtctccctttatttgcctaaggtcctgtaatgacaagggaacttgaaggggccccaaatgagggggatcatgaggtggttcccttcgaagttgcttctctaattttggagaaatattctttttgggtctgcccgatatgattgctaaaagcactaggttgattttgtaacacttgcaaagatctagtaaaaaggccatgcccttgtgcaaaagaaaatgagctgctttttctttcaagtctcagggtgaaagaagtcccagtgcttcagaatgcactccaagggagtgcaggtttcagatagtacccatctagaaagaaaagtggaaaaaaaaaaaaaaggcatccctttgtctccttccttttggtgtgactcagtgtggagaggaagacagtgggggtgtccccttgctgttttccctctatagttcctgggtcctgacaccttgttgaacatgctgctcatggttgctggcgtgacccccagccatggaaccagaggaactaagagattgggattagtcatgcttacccaagtggctctagttctctgcctgtgatttccctttgacttcctagatttgtgtgacctgcctggctccctgaaaaatggatctccagaaaaactacataatagttgaagaaggccactttaatggagggggtatgctagattgaactttatatcctgctattatggcctgtgctgaagcgtttacccatagagaatggttcaggctaacttctgaacttaaaatccccttactaattaagtgccactctaattggaggcagaacaggtaccttaaaagaacgtagagactgaatgggcattttcctgctgatgggacagtatcaagactaaaatttggctttggaggatattttaatgcaattgttgaaggcagaattttcccgtttaccaaagcagcagaaagcctggtttccagtagagaggctcaaaaagggaagataattgagaggctagggtattttgttgaaggaccaacaatgtgcctcatggatccctgttccactaggtggcactgttgaccttgaaacaccatgtgctctctagaccaagggcagagtgaccttgacatgccatgtgctcttcagaccaagggcagatagagacctggaaatgccatgtgctctacagaccaaggacagagagagacctggaaatgccacatgctctccagaccaaaggcagagagagacctggaaatgccacgtactctctagaccaaggacagagagacctggaaatgccatgtactctccagaccaagggcagagacctggaaatgacatgtgctcttcagaccaaaggctaagagagagacagtcactgtggtggggggaaccctctgttcctagaaaatcacaaagacatcttcccttgggctatatccccagttactagacattctctgatattgccaaacaatattacttacctgaactgtaaaacttcccacatatatttcatacacaggataagagatatgatagttgcaaacaggaaaggaggaaattatgataggaaagttggggatcctgttgctgacaccccatcagggcagtcagaggctggggtcagtccagaagcctttgaataataccaggtgggagctctggccagaagaaatattcatttgccctaggacttctttcagtcccgtgcaacaactaagtcctccatgaaaggtctaaaatggaggctgagagcctcagaaggaaaggacagagttggagttcgctcccctctactcaccattttgatgaatgttgtacttggtrtcctagacaaggttcccattatgaagtggctacattgtctgggttataaaccctggggttcattgtcatgcaccaggaaaatttagggcacagacacacatgaggagtttaggaacagaggtttaataggtagaagagaagagaaagagcaacagcttcctccgtagaggaagaggtctcctagmrgaaagggccagctggccaagtttatagtccagtttgaggaggtggtgtctgatttatatagggctcatagattggttccatcaggtatgatgtttacatagcaagcagggaaggctagttgtcccagggctttccagttgatcagtgccatcttatctgctccttacagcacacgtggctggcagagaagggaagatggagccgccatcttaaaaatgtccagtccttagttcctgccggcattcatccatgcaagctcccagcttgcaggctgttctttgttagaaaatgatcggggctgctttttattaaacagaaaagcctttccaaggactcccatgtccttgctatctgcctaagggatttcttcttaactcctgcatcactatggaaggggactggagttaaatgtaatgtcgcagagcaacaactttgtgctacatattatgccttacaagttgaggacattacaaagagggtctcgaggctcgtatgcaccccgtacctcacagcargttggctgaagggtaccttccagaaaccaaagtctatgaatgcccagactggccaaatgtgaagcctgccttcaacagaggagcacatgaactaatagccccttgattgcagagctccatttgatgcttggacctgtcacttatgttacaactgaaggacagtcttcagtggaggatgctgagcctccacaaatcccttcctttttacagtagggacagggtccaattcctaaccaggcctggtacacagatggctcatcacgatgcaatccttgcaactagacagttgtggccactcagccatccactgatagtatctggtttgatacaggtgaagggcatagtagccaatgggctgagctgtaggcagcttggatggtcctccttcataagctggacccagtagtcctatgcactgacagctaggctgtctttaagggactcacaatgtggctactatggtggaaaacacaggattggtcaatagcagcctgtgccctttcaggtgctgacgtgtggaatgacgttctccatgcatccagaggatgcatgtaacagtctaccatgtggatgcccacattgcatctacaccacctggaaatcaacaggtagacaagcctagcctacattctcctcctcaaggaagtgcccacaaaagatgtggsttactggctacataaaaagacaggacattggggaccacataccttttgggacatagwgaaaattgaggactaccactatgatataaagatatagtactcatctatcagcaatgtcctacctgtgcacagcaacacctcaggccctttccacacaatactgaacagataggccagggctgcagccaagtgcaacagtggcaggtagactacataggacctttgcctctatgtaatggctgccaaggaacccagtaatggctcagcccaagtcccaaaacctcaaaagtaaggaagtcaacattgtggcctcacagctgtggctgaaggcccgagagcccctggcaaaccactgatgtaagtccaagagtccaaaagctgaagaacttggagtcttgagagcaggaagcatccagcatgggagaaagataaaggcaagaagactcagcaagtcagcttcttccaccttcttctgcttgcttttctagccatgctggcagccaatgggataatgcccacccacattgtgggtgggtcttcctgaaggtggttcttcctctcccagtccactgattcaaatgttaatctcttctggcgacacccagaaacaatactttgcatacgtcaatccaatcaagttgacaatattaaccatcacagatggctatccccacagcaatgtaaccgatcccttcaaataaccaaagatatgtggctgggtggcagtataactctctccacatgggggcctatccctccccttggggattgttatgggccgtgacacccacagctggccttacttaccctctaattggactggtatatgcacctggtggcatccttgtcagtatgcgttgtgtcccgtttagataccatgcattcctattcactgggagagtgtaaaagtcaggtactgccagaagcatgcattctggaggttttaccctttggccattttttctccccaagtggcaacaacagatatagatagagttgcaagttgaggctaaacatatggctgcagccattaatgataccaatcatgctattcttcttcttactgtagagaccacccaaatcagacacattactttgcaaaatggcatggacatcttaactgctgccctgggtagaacctgtgcattagttaaaactgaatgttgtgtatatatccctgattactctcacagtgtaactaggccatgcgggtcctaaataccagtatttaggtctaccctgtgcattatattctatagtgtatattataataacactatagaatctctgtcttacacccctataacaacatggttaaatcaactcccaagcacttggtagaactttctatccagtgagattgtcattatatttgttattcttttttgttgttgtagtttgtattgctgctgtagcatctggctgaaatgctcctccacatacctgactgtaggagaatratagaggaaatggcatgataagaatgagagggccattcaagagtatgttagggtggagtgtatggcacatgcacctgacagcaataacttaagtataccctgagaatgatcctgttgtcttacaagaatgtgtgtctggagtcctaagctaaggaatccaagagtgacgaacctgaggatctattccatatttacggaggacatctgaacccccagcccaccccttggaatgcaggctgtaccggggattattttggccaagtggaggttgttaagtgaaaatgctatataaaccacatgctttttacaagcggtaacagttctcctgtccaactcaccacctctggaccatccttttatgtaagttcctcactaaatgctgtgcctcgtttgctggctccgggtctcttcttcagcctctcagacatggtgccatccttattggagtcagtaggcatccagaacaacagcattcagataatgtgatgctttcagcttcattctttttccttaggattgctttggctatttgggctcttttttgattcgataagaactttaggattgttttttctaattttgtgaaatgacattggtactttgataggaattgcattgaatctgtagattgctttgggctgtgtggtcattttaacaatactgatttttcaaatccatgagcatggaatgttttcccattttttttgtatcatctgtgatttcttttatcagcatttgtggttctccttgtagagatctttcacatccttggttaaatatactactaggtattttaatttttatggctgctgtaaatgggattgagttcctgatttgactctcagcttgaatgttattggtttatagaaatgctactgatttctgtatgttgattttgtatttggaaatttactgaagtcatttttcaagtctagaagtctgttggaggagtctttaggattttcttggtataagatcatgtaatcagtgaatagagatagtttgactactcttttcctagttggatacgttttatttctttctcttgcctgattgctgcagctaggacttcccagtattatgttgaatagtagtgctgagagtggaaatccttgtcttgttcctgttttaagggggaatgcttgcaaattttctccattcagtatgatgtttgctgtgggcttgtcatagatggccgtttttattttgargtatgttccctcaatgcatagtttgccaagggtttttatcatgaagggatgctggattttatcaaatgcttttttttttttttgcatctactgagatgatcatatggtttttgtttttaattctgtttatgtggtgaatcacaattattgatttgtgaatgttgaaccatccttgtatccctggaataaagcccacttaatcgtgagttacctttttaatatgttgttagatttggtttgctaatattttgttgaggatatttacatctgtatttattaggaatactggcctgtattattaggaatatttgttgtgtctttgcatgattttggtatcaggatgatactggttttgtagaatgaattagggaggaatccttccaacttgattttttttttttttttttttggaatagtttcactaagtttggtaccagctctcctttgtatatctgataaaagtagtccatgagttcatctggtcctgggcttttttgttgttgttgttgttgttcgaagatttttttattactgattcaatttcagtactctttattggtctgttcaggatttctatttcttcctggctcaatcttgggaggacgtataggaattaatatatttcctcaaggttttctggtttatgtgtgtatatatgttcatagtaatctctgatgatcttttatatttcttatcagttgcaatttcactgttatcacttctgattgtacttatattcttttttttatctcttgtaacctttttaaatttaaagtctgtcttttttctgaatattagtattaccatacctgttattttggttactatttgcatggaatatcttctttttcatcttttcatttttaatctattagagtctttggctctatagtaaatctcttacagcatatagttgagtcagtttttatctattctgttaatatgtcttttgattggaagtttgatccatttgcattaaaattactaatacagagggtcttctgttattttgccagtcgttttttataccatacagctttttttgtccctcatttcctggatgactgtctttttcatgtttgggtgattgtttttgtagtgaaatatttttttctctctctttcatttgtgtatattctatagctattttctttgcagttatcatggggattacatttaaatatcctaaagttataaggctataatttggatttacacctggttaattttcagtaacacacaaaaactctgctccttcatgcctttctctacaccctttttggtttttaatgtcacaaaactactttgttacaagttgtttactctataacataaactaataattcttttaaatgtatctgtctcatataaaatataaaatgtagtattaccaaccaaagttacaataatgctagcttttagactcataatttttaaaatgaattagtatcttaatttgtatagagagcaaaaggtggaattttgaaccattgttacaataatgctagcttttataatatacctggtagttaattttattgagtttttttttctttgtatggctttgagtagctgtctagtgcccttttatttcaccctacaggactcccttgcacatgtcctgcaggcaaggtctagtggtaatgaactcccttagtttaggtttatctgggaatttctcaatttcttcttcacttttgaaggacaattttgccagatacgggattcttggttgacattttttttctttcagcactttttttttttttttttttttcgaaacagtcttgttctatcacccaggctggagtggagtggcatgatctcagctccctgcaacctccacctcccgggttcaagtgattctcctccctcagcctcccaagtagctgggattacaggggcttgccaagatgcccaccgaattttttgtgtgcgtatttttagtagagatggggtttccccctgttggtcagactggtcctgaactcctgaccccaagtgatctgcctgcctcagcctcccaaagtgtggggattacaggcatgagccaccatccctggcctcttttggcacttttatcagcccagtgctttcttacctccaaagcctttgatgggaaatctactggtagtattacttaggggcccttgtatgtgaaaaatcacttctctctttctgctttcaacattccctttgtctttgtattttgaacatttaattataatgtgtctcacagtgggtttatttgagttcatcttacttggagttcattgagcttcttggatgtttgtattcatacctttcatcaaatttggggagtttttagccattatttcttttaagattttctctggcagtttctcttttccttctggagctcccatgatgcatatgttgatcagcttgatggtatgtctcaggtccgttaggctctattcacttttcttcagtcttttttctttctgttccttaggttgataatgtttattgtcctgtcttcaaagttcctgattctttttctgtctgctcaaatctggctttgaaatcatcttgtcattatattttccagctccagaatttctttctggtttgcttttaggttttctttttattgatgttttcattttgttcattcataattttgactttccccacatcttcctttaagtctttgagcagattttagacagctgttttacagtctagtaggtctgccattaggtctttttttttcagggacagtttctgtttattttttcctcttaaaataggccatactttcctatttcattatatgcctcatgattttttgttgctgaaaactggacattggaatctaataacatggtaactgagaatcagattcacatccttctccagggtttgctgttttttattaccgttttagggtttttacaattgttttaggctgactgtgggccaaagattatactaaggtgaatcttaaggtcttctcaggccttgtccaaaactatacttttcctgcccttggaatgtgtggtaactttctaattttccccatatatgcagttgcatttcagagtcctagtctttaatgtttggttcgcaaaggggcaagaaagaaaaatgaagggggtaatgagagcacagctccttaaatctactacaagtcacttcaggcaaggaggaggggtttgcaataatgaggggtgaggtgcaatgaggggtcaggtgccctgcctccctgtctgcacctctgcaatcaagcatcaattcacagagcacagaacccctatgttttgctcaccctcgttccagacagctgaccaccagctgctctggaaggtgtgcacagttgcccaccatacagctggggtggtggatgtgtaacagatactgtgctaagagctgaaattgaaaattaactgcaatttaccatccaagcctttccctaaaagttgcaagcctcagtagactccatagttccaaaacaattacatcagacagattctgccaatgcaattattatttaggttccagattcctggtgctttctactctgtcatcttcccagagatcagtgttcagaatccagggatgataagggatctaaaatttttgatatatcagaaagggggaatccgtgtgaagaggtgagacccagaagtctttattgtggtcccctttgggtccttaatggagagctagactataggtagacaaggcatagcaaaaagccactgctgtgagattaagggctaaatggagatgctagagttttcacagttctgagaaatactagaattctgactcatccaaacttaagcatcctcattgggcatttgtataaaatcccacattaaacatgtcttatatttactaaaaacaaaaaattggacaattttttgttctgttgtgagatttttttttttaaataaaactgttaggatagaaaatccagctgcattaaatgatgataatgttgatatccttctccatgaccctcaacctgataattctattacagggttattttgtggtctttttaaaccttctcataaattcattatggagactaaaagagccaactttcaaattgctaacaagatctttccatttcctctttgggtttgtcttttcttttctttttctttttttttttttttttttgagccggagtcttgctctgtcgcccaggctggagtgcagtggcgcgatctcggctcactgcaagctccacctcccgggttcacgccattctcctgcctcagcctcccgagtagctgggactacaggcgcccgccaccgcgcccggctaattttttgtatttttagtacagacggggtttcaacgtgttggccagaatggtctcgatctcctgacctcgtgatccgccctcctcggcctcccaacatgctgggattacaggcgtgagcccccgcgcccggccttcttttctttttctttttcttttcttttcttttttttttttgtaagagaatctcactctgttgcccaggctggagtgcaatggcacaatctcagctcactgcaacctctgcctcctgcattcaagtaattctcctgcctctccctcccaagtacctgggattacaggcataagccaccatgcccagctaatttttgtatttttagtagagatgggttttcaccatgttggccaggcttgtctcaaactcctggccttaagagatctgcccaccttagcctcccaaagtgctggaattacagatgtgaacgaccatgcccagcctcctctttgtttttcatttccctagatttgtaatccaaaaatcagagacacaaaaacaccatcactatggagacattaatttgccttattcttccttctctttgacagtgaaaaataagtctgtgtagcacatacaaaactgtaattgactctctggtgcagctgccattgggtctttcctataagaaattgtattagccttccttttaaatgtgttctgggtaataagtcatcagaaatgttcaaggattttcaaggaaatgatgaacataatgattgaaaagatagggattctcaggagaaacatagaaactgtatgtttttttaaaagcaaaatagaaattctagaagtaagaaatataaaacctgaaatgaaacatttactcagtagaagattggacataataaagggtcagtgaacttaaagacagatcagtataaagtatccagtctaaagaaaacaaaaatatttcaaaaaatgagcagagtctcagtgacttatggaacaaaatcaaatagtctaaaatacatgtaattggagcttggtgaaaaatattggcctacagatccaaaaatctcagtgaattccaaatataagaaatcaatacctaggcacaccatatcttggcacagcatagacaaattactgaaaactagtgatgagagmtaaatctttaaaatacccaggaaacaaaaaattgtatctttaaaatacccaggaaacaaaaaagagcaacagctaatacgaattatgactgacttcaaatcagaaacagtaatgccaaaagataatggaacagcatcatcaacatgctaaacaaaactaaaactctcaactcaaaatcttatatccagtgaaaatcatccttaagtgagggtgaaataaagatacttttaaattagtgaaattaaattgaaattagcagcagcactactagaaaagctgaaggaggtttttcagataggacaaaaatgataccagatgaaaactcgtctctacatgaaagaatgaagagtcctaaaaatcataagcatgtggactaatattaagtctttcctcattttaaaatttctttagtatataattatttaaagcaaaagtaataacaatacattgtgataattatgtctacaagaaatgaataacagcaacatcagaggagggggtaaatggaattatattattgtaagatttgtgccttttaactgaagtggtgcagtatgaattctaggtagactgtgataagttaaaattgcatattatggtgccaagaggattttwaaaaaaatgtaaataggtatgttgctttaaaaagtcaaaagaggaaattttaaaatacttttaaaatattcaatccaaaagaagacagaaaaggaggacaaacagaaaacaaataataagatgttacacttaaccccaaatatattaataaataacgaccgtaagttcaaactggatggatactcaaaaagcagacatgaatttttttttttaaagtcagagattgtcagactggataaaaagcaagamctaattatgtttggtgtataagggaagcactttaattattatgacacaaataaatttaaagaaaaaatgtgaaaaatatatatcctgcaaacagtaaatataagacaaagtgacttcaaaaacaaagaaagtatcaccagagataagagagacattataatgacaaaagtttaatcaggcagacatgacaatcctaaagaagrtaactgagcttcaaatgcatgaagcaaaagccgacaaaccaaaaaagaaatagataaatataataattcatagaacatgtcaaaaaatcatgaatatataaaatatgtgaaccaacttgatctgacattttttgaacctatatccaacaactgcagaatacacattcttttcaaatctacatggcatattccctaaatataaactgtattctggttcataaaataaagctcaacaaattctagaagattgaaatatgacaagaaaggaattaaattacaagtcaattacatccaaatatctatgaagttcccaaatacaaagtaaataatacttctctaaaaagatcacggattaaagaaggaatcacaagagaaaatgagaaatattttgaattgaattttaaaatgagaacataatatatcaaaatgtgtaggatgattataacatgtagcataaaataaggcaccatgacttcataatgatacaagtaaataaatccaactaataaatataaaagtaaagatagaattagaaaatgacaatttggcaaacatcatagtgataattttctaagacaagaatccataatggatgctataactggtgagaaaaagtttcatgaaaaacaggatatttacatagcctcaaaatattttctcatgaaatatctatgatttacaaagggaaaaggaataactttgcagtggagaaggctggcagatgccctgttaatcaagtaatcaaaatttatatttatatcatcaataatggaagaaataaaagtaatttgtcacctcatatattgcagtaagaacacaacatccgttccttggtattcttgaaaaaaaaatgcataacccaaatctagtcatggggagtatcgattgaacctacattgagagacattctaataaccagcctatactcttcaaaaatgctaagttcatagaaagtaagagcaaagaactattccagattaaaggagactaaagaaacattacaactaaatgcatcaataaatggatatttgtgataggaaggacattatttgaacaactggtgaaacttcagtgattaagtttgagtaatgatatcagtgttaatttcatgattttattggtttgattgtggttatgtaagtgaatgtcctaatttgtggaaaagaaacgctgargtattcaagaatatgttggcaacttactctgaaatggttcagaaaaaaagtgatctttgtactgtacttgaaacttttctgtatctttgagattacttaaaaaatataaattttcacttactatcacagatctagactctactattacatgcattctctcaatagatgctgtgtggtttggaagtcratttggccacagaaatgctgcttttaattctttgtctttaggacattattctgcttttgaaaattcaggtaacctctccaaactcattattactgtgccataaaagctactcattttactttactcattgtggcataaaagccacccaagattgcatctctggcttcatgttggatggcatgaggatgagtatgccttctgaacattctcatgttggcatccctaattaccttggccattggcgcaggtccagttggaatgtcaactgtgccatctgataatgctataaaaagacctatagctgctgctctccagccatctgtgccttcccttggcatgatactgttgggtagtttgtctttcattggcatgatttttgtaggatggcttacatctgccactcctaggcacttgcttggtgatcaagttgacatagaattgctttgttggcactgtttttatatagaggagttttatacctgctaacttctgaaacaagacttaccatttattacataccttataattgcaattttaaatattatgaatatagactcgtttttgcctctgttgactcaaacctagcttggactttcaagtttaaattctcccaattggaactctccagtcagaagaattaactatgaaatgaaatgtacttctgttttaagatattagattgagtgtacacataaatctcttctacttctgtgccaaatctctggaaatgatggaagatgcatgtgtatgcatgtgtgttttaaaaatttataactggaattcaagacaagaaatttgatggaccagagtttgtgaggaatctattgaaaactgtaaaacagaatgaaatagaagaaacaaagcagaaaccaaaatgtcaagaggagaagattgctaccaaaattgggaggagcactaaaaagttcttcatgccctgaggaaaggaatactaggaatgggaaagtgttcctgggcaagcaaggatgaataattagggtgttacaacaggaagagtagcgtgagtgagtggagaaaagtcagaataagtggatactgattaaaccctaggtatttttagaaaaataagttgatatgagtatgttgaaaatttaaggatattcagccaaaaaaaaaaaaagaatggatggtgtcatggactgaattatatccacccttccccagttcatatgttgaagccctgaccttcaatgtgactatatttggagatagaacctttgaaggaggtaattaaggttaaatgaggccatgaggatgggccccttatccaatatgactggtgtccttacaagaagtagaagagacaccaggaatgggtgtgcacagaagtaagaccatgtgaggacacagcaagaaggtggccatctacaagccaaggagagaggttcagggagaaaccaaacctgccagtttgacaatgaatttccagcttctggaactgtgagaaaataaatttctgttgtttaggccgcccactctgtggtattttgttatgacagccttagccgactactataaatgctataactttagaactagtaaataggaaaaacacaacaaagaaaacttgataaaaaattaaaaagcaaataggaaataatcaaaaggaaatagttaaaggtatgataagaaaccatagaataagctagctagaatatctaaacatcataaattataataaatgtaaatgaattaaattcacttgttgaaaatcagtgaccataagattggatttttaaaatatccatgtcacgtgtgtctgtgtgaagagaccaccaaacaggctttgtgtgagcaacagggctgtttatttcacctgggtgcaggcgggctgagtccgaaaagagagtcagcaaagggtggtgggattatcattagttcttacaggttttgggataggcggtggagttaggagcaatgttttgggggcagggggtggatctcacaaagtacttctaaagggtggggagaattacaaagaaccttcttaagtgtggggaagattacaaagaaccttcttaagggtgggggagattacaaagtacattgatcggttagggtggggcagaaacaaatcacaatggtggaatgtcatcagttaaggctattttcacttcttttgtggatcttcagttgcttcaggccatctggatgtatatgtgcaggtcacaggggatatgatggcttagcttggactcagaggcctgacaatccagatatatattacatttagaaaatttaaaaatttgagtgtggtggtgtgcgcctgaagtcctagctacttgggtggctgaggtgggaggattacttgagcctaagagttcgaggctgcagtgagcgatgattgtcactgcccctcagcttgggtgacagagaaagaccctatctaaaaaaaacaaaatgagagagagagagagagagaaacttgtttcatgaccttgtgttattatttaatgttccatgtgtactgaaagaatgtatattttgctcttgctgggtgttgctctttaaatgataattaggtcagttggttaacagtgaagtttaagtctttatatccactgactttctgtttgttctctcaactacttcgagaggagtgtttaaatcctctttactttagaactagtaaataggaaaatctatttttactatttactataattgtggatttcattacttctactttcagctctttcagagtttgcatcaacyattttaaagccattgacctttttcatgaaatggctttttcccccaataatagttactgttctgaagtttactggtcctttattaatataggcatttcagctttcttttgattggtgtttgcattatatatattttttattctattatttctgcctatctttgtctttaaagtgggtctcccgtagacaaaatgtagttgattcctgctttttcatctagtacaataatctctggggttttatttttggacttttttttttttttttttgagacggagtctcactctgtcacccaggctggagtgcagtggcacgatctcagctcactgcaagctccacctcccgagttcacaccattctcccgcctcagcctcctgagtagctgggactacagccacccgccaccacacccggctaattttgtttttgcatttttagtagagccggggtttcagcatgttagccaggatggtcttgatctccttacctcgtgatccgccgcccttggcctcccaaagtgctgggattataggcatgagccaccgcacccaaccttatttttggactgtttagaccatcttcatttaatgtaattatgtatttcgatttaaacctgtcatttcatttttttgtcatatctgttctttgccttttcttctttttaccttttttggtgcttcatttgaattaatttgtttttgttttgttttgtttggcattccaatttaccttctattttggtttattagctatacttcatttttaaatttttttgtgtgtctatgtccatgtgcaaatgcttgttctagggcttaaaatacagtagtcccctcttattaccagcagcttcaccttccatggtttcagttacccacagtcaactgcagtctaaaaatattaaatggaaaagaaaattccaaaaataaacaattcattttaaattgtgtgccattttgagtagcatgatgaaatcttgtgttgtcctgctccatcctgcccaggataaaaatcatccctttgtctaacatattcatactttatacagctacctgcccatttgtcacttagtagccatcttagttattatatcaactgtaaaactattacagtgcttgtgttcaagttacctttagtttgccaaattatggccccaaagctcaaaagtagtaattctgacaattcggatataccaaagagaaacctttttaaagtgcttaatttaaaagaaaatgtgcaagttctcaacataataaggaaagattaaaaaatcatatgctgaggttgctaagatatatggttagaacattttctgtccatgaaattgtgaagaaggaaaaataaaaccatgcacagtatatataggattcagtattatccatgctttcaggcatccactggggacmccccacaggtaaggggggactactttatgcatgtttaagttataaccatctgctttcaaataatataccacttcatggatagtgtaagaacatgacaacagtatatattcattcctcctatcttctgtgctattgttattaatttcacttttatatataatacatgccataatacattgaaactgtttttgctcctagtttttaatgtaaaaaaaaaagtcttttatatgtacccatgtatttaccattttggtactcttcattcctttatatcattccaagtatctatccgatatattttcttttttgactgaataaccttgtttagtatttttgttgcactggcctttactgataaatcctctcagctttgtatcaccttcattcctcattagaattcctcattgttctctaagttactcctaagatacaggagcaaacagaatcgaaacaacacaactacctcgttggtcataatatacagcactgccctagcactgtttagaaccttagtgccagtgatacggaattasagacaaaaagtcacaaccctaattccaaagtactcaaaatgttacagattttgaagcattttggatttttagatttgggatgctgtgcttgtcctgagcgtgttattgtattggagaaagagctagaacagaggttggcaaactttttttgtaaaggccagatagtaaatacttcaggctctgcaggccacagtctctgtcacaactattcaactctgccactgcagctcagaaacagccatcggcaatatgtaaacaaataagtatggctacgttctaataaaactttatttacaagaactggtcataggctgtatttggctcacaggctgcgctttatcaacatatatacaatgtttatagaatgtttgaataattatacaaatattaatcctacttgtaaaattataaaagcattccaaaagctgggtgtggtggcatgcacctgtaatcctagtgacgcaaggggcttcaggcaggcggattgcttgagcccaggcctttgaggccagcctgggcaatatagcaaaacctcttaaaaaaaaattctaagatttctttgcagttcttttctttgtaaatgcatcccacaagcgattaaaaaacatttatattttaaagtgacttgaaatcatgttcttcataaagttatgccacaaatttgatacacagtcaggccactatatctgttagttccccatccatggattccaccaaccatggatcaaaaacattcagaaaaaaaaattccacgaaattccaaaaagcaaaacttcaatttttcccaagccaaacgctatgttgaatccacattaaagaaataatgtgtaggaattatagtaagtgttataagtaatcaagagatgatttaaagtgttttgggaatatgtgtgtaggttatgtggaaatgccaggccattttatataaaggacatgaatatcagtagattttggtattcttgggggtgggggaagtcatgagacaaatccctcattaatactgagggaccactatactactaagttcatttagttaattttgcttctgattattgagaactgcctttcacttttatttattttataattatgtaaaaatgtatatggctgtaaagtaacatcatcaaaaaaattacattcagagagatccaattttaatctatgttttataaatcagttggctgtaaagatgtagatttctttctgagttctctattctgttccatcgatctatgtgtctgtttgtttgtttatttatttatgagacagagtctcgctctgtcacccaggctggagtgcagtggcgcgatctcggctcactgcaacctctgcctcccaggttcaagcaattctcttgcctcagcctcctgagtagctgggactacaggtacgcaccaccacgcccagctaatttttgtatttttagtagagacagggtttcaccatgttggccaggctggtcttgaactcctaacctcatgatccacctgcctcagcctcccaaagtgctgggattacaggcgtgagccactgcgcccgagcccrtgtctgtttttataccagttccatgctttttgggttaccataastttgtattatattttagtagcgtgccttcagctttggtctttttgctcacattgctttggtatttagagttgtttgtggttctataatacttttaggattattttatctatttctgtgaagaatgtcattgatattttgataaggattgcagtgaatctgtagattgctttgggtggtatggttcattttattttttttttatttcaataggttttagggaaacaggttgtgtttggttacatgaataagttctttagtggtgatttctgagattttggtgcacccatcacccaagtagtgtccattatacccaatttgaagtcttttatcattcaccgcacccccaccattttctctgagtctccaaagtccattgtatcattcttacaatattgtgtcgtcatagcttagctcccacttgtgagtgagaacatacgatgtttagttttscattcctgagttacttcacttagaataatagtctccaattccatccaggttgctgcaaatgccattattcaattcctttttatggctgagtagtattccatagtatatatatatcacattttctttatccgctcgttgattggtatttggactggttcyatatttttgcaattgcaaattttgctactataaacatgcaggtgcaagtatcttttttgtataatgacttcttttcctctgagcagatcccagtagtgggatttctggatcaaatggtagttctacttttagttcttcacagaatctccacactgttttccacagtggttgtactagtttacattcccaccaacagtgtaaaagtgttcccttttcaccacatccacaccaacatttttttaaaaaattcttttattatggccattcttgcagaagtaaagtggtatcacattgtggttttgatttgcgttaccctgataattagtgatgttaagcattttcccatatgcttgttggccatttgtttatcttcttttgagaattgtctattcatgtccttagcctactttttttatgggattgttgggtttttttttcttgctgatttgagttctttgtagattctggatattagtccttcgttagatgtatagattgtgaagattttctccctttctgtgggttgtctgttaactctgttgattatttcttttccagtgcagaaaaacttttttagtttaattaagtcccatctacttatctttgtttttgtttcatttgcttttgggttgtagtcatgaagtctttgcctaagccactgtctagaagggtttctctgatgttatcttctagaatttttatagtttcaggtcttagatttaagacttcaatccatcttgagttgatttttgtataaagtaagagatgataatccagtttcattttctgcatgtagctagccaattatcccagcaccatttattgaaacgggtgtcctttcctcactttatgtatttgtttgctttgttgaagatcagttagctgtaaatatttgcctttatttctgggttatttattctgttccattggtctatgtgcctatttttataccagtaccatgctgttttggtgactgtagtcttagggtatggtttgaagttgggtaatgtgatgcttccagatttgttctttttgctttgtcttgctttggctctgtgggcttgatatggtttggctgtgtccccacccaaatctcaacttgaattgtatctcccagaattcccacgtgttgtgggagggacccatggggaggtaattgaatcatgggggtcggtctgtctcatgctattcttgtgatagtgaataagtctcacaagatctgatgggtttatcagtggtttccgtttttgcttcttcctcattttttctcttgcctcggccatgtaagaagtgcctttcacctcctgtcatgattctgaggcctccccagccatatggagctgtaagtccaattaaacttctttttgttcccacttttgggtatgtctttatcagcagcatgcaaatgaactaatacagcgctcttttttggttccgtatgaattctaggattgttttttctagttttgtgaagaatgatggtggtatttgtagactgcttttgattgcttttgacagtatggccatttccactatattgattctacccatccatgagcatgggatgtgtttccatttatttgtgttgtctattatttctttcagcggtattttgtagttttccttgtggaggtctttcacctcctttgttagatatattcctaagtattttcttttttttctttccttttccttttttttgcagctgttgtaaaaggggttgagttcttgatttcattctcagcttggtcactgttagtatatagcagagctactgatttgtgtgcattaattttgtatcctgaaaccttgctgaattcatttaccagttctaggagctttttggagagtctttaaggtgttctagatatatgatcataacatcagcaaacagcagcagtctgacttcctctttaccaatttggatgcccttgatttctttctcttgtctgattgctctgactaggacttccagtaatatgttgaatagaagtggtaaaagtgagcatccttgtctttttccagttctcagggggaatgctttcaacttttccccattcagtattatgktggctgtgggtttgtcatagatggcttttattacattaaggtctgtcccttctatgctgactttgctgaaggtttaatcctaatgggatgccggattttgtctaatcctttttctgcatttattgagatgatcatgtgatttttgtttttaattgtgtttatgtggtatattaaaccatccctgcatccctgatatgaaacccacttgatcatggtggattatctttttgataggctgttggattcaattagctagtattttattgaggattgttgcatctatgttcatcagagatatttgtctgtagttttcattttttgttatgtccttccctggttttggtattatggtgatactggtttcatagaatgatttagggaggattccctctttccctatcctctgcaatagtgtcagtaggattggtaccaattctttgaatgtctgatagaattcagctgtgaatccatctggtcctggacttttttttgttggcagtcttattactatttcaatttcactgcttgttattggtctgttcagagtttatatatctccctggtttaatctaggagggttgtatatttctaggaatttatccatctcctctaggttttctagtttacacacaaaaaggtgttcatagcagccttgaataatctttttctgtggtatctgtagtagtatctgtcgcccaggctggagtgcagtggcatgatcttggctcactgcaagctctgcctcccaggttcacaccattcttctgcctcagcctcctggtagctgggactacaggtgcccgccaccatgcccggctaattttttgtatttttagtagagacagggtttcactgtgtttgccaggatggtctcaatctcctgacctcatgatctgcctgcctcagcctcccaaagtgctgagattacaggcatgagccaccgtgcccagctggatgttctcctttgcttggttaatctcactaatgtctatcaattttattttttcaaagaaacagctttttgttttatttatcttttgtatttttttgtgcgttgtttcaatcgatttcatttagttctgctctcatcttcggtacttcttttcttctgctggttttgggtttggattgtccttctttgtccagttccatgaggtgtgactttagattgtctctttgtgctctttcagactttttgatgtaggcatttagtgctatgaactttcctcttagcaccgcttttgctgtatcccagagattttgatgggttgtgttactattctcattcagttcaaagaatttttaaatttccatcttgatttcattgttaacctaaagatcatacaggagcaggttatttaatttccatgtatttgcatggttttgaggattccttttggagttgatttccaattttattccactgttgtctgaaagtacttgatagaatttaggtttttcttaaatttagtgagacttgttttgtggcctgtcatatggtcttcatatgctctgtcttggagaatgttccatgtgctgatgaatagaatgtatattctgcagttgttgggtagaatgttctgtaaatatctgttaagttcatttgctctggagtatagtttaagtccattgtttcttgactttctgtcttgacgacctgtttagtactgtcagtaaagtattaaaggcccccactattattgtgttgccatctatctcatttcttaggtctagtagtaattgttttataaatctgggagctccagtgttaggtgcttatatatttaagattgtggtattttcctgttggactagcccttttatcattatataatgtctctcttcgtctttttaaactgctgttgtcttaaagtttgttttgtctgatataaaaatagctactcctgctcacttttgttgtccatttgcatggaatatctttttccacctctttaccttaaatttatgggagtccttatgtgttagttgagtttcctgaagacaagagaaacttggttggtgaattcttatgcattctgccattctgtatcttttaagtgaagcatttaggccatttacattcaacattaatattgagatgtgaggtactattctattcatcatgctgtttgttgcctgaataccttgtggtggttgtgtttttgttttttgttttcccattgtgttattgttatgtaggtcctctgagagtcatgctttaaggaggttcgattttggtgtgttttgaggatttatttcaagatttagcttttttttagcagttcttggcatgctggcatggtagtggcgaattctctcagcatttgtctgtctggaaaagactgtatcttttcttcatttatgaagcatagtttctctggatacaaaattcttggctgataattgctttgtttaaggaggctaaaaataggaccccaattccttttagcttatagggtttctgctgagaaatatgcgttactctgataggttttcctttataggttacctcatgcctttgcctcacagctcttaagattctttccttcatcttaactttagataacttgatgactatgtgcctaaacaatgatctttttgtgataaatttcccaggtgttctttgagcttcttgtattttcatgtctagatctctagcaaggctaaggaagttttcctcgattattccctcaaatatgttttccagacttttagatttctcttcttccttgkgtacaccaattattcttaggtttggacacttaacaaatcccaaacttcttataggctttcttcacatttataaattattttttctttgtctttgatggattgggttaatttgaaagccttgtcctcaagctctgaagttctttcttctgtttgttcagttctattgctgagactttccagtgcattttgcatttctctaagtgtgtccttgattatcagaagttgtgattgttttttatttatgccagctatttcagtgaagatttttcttttcataccctgtgtcatgttttttatttctttaagttggacttcacctttctctggtacctccttgattagcttaataattaaccttctgaattctttttctggcaattcagatttaatcttggtttggatccattactggtgagctggtatgttctcttgagggtgttaaagaaccttgttttatcatattaccagaattgttctggtcccttctcatttggtggactatatcagagggaagatctggaactcaaggactgctattcagattcttttgttccatggagtgctcccttgatgtggtgttctccacctttcccctagggatggggtttcctgagagtggaactgcagtgattgtttttgctcttctgggtttagccacccagtggagctactgggctctgggctggtagtggggaatgtctgcaaagagtcctttgatgtgatttgtcttcagatctttcagccatggatacccgcacagtttttcagtgtctcagggagcctgcagggtgatcaagttccttcagagtctatggattctctcagctttcttggtatgttcttgcagtagttcttggagcaaaagttcatgatgtgagtttctatacactgttttgtctgtccaagcaggagctgcaagctagtcctgcctcctatgcaccatctttctggtgctctctgattcattttaatgagattaaatcttctgatccatgagtatgggatgtctttccatttgtttgtgtcctctttggttttttttactggtgttatttcattttcctcatacaggtctttcaccttcttggttaaacatttcttgtgtatttttttgtggccattgcaaatgggatttctttcttgatttatttttcagctagttcattattgatatatagaaactctgatatttatatgttgattttgtaaactgaaactttactgagttcatttatcatttctaataactttctaggtataagatcatgccgtctgcaaatctgactttgttttttctagctttccttctcttgcttgattgttctagctagtacttacagtactgtactgatcaggagtggtgwaagtgggcatccttttcttgttcagttcttagaagaaatactttcagcttttgcctattcagtatgatgctagctgtctgtttttcatatatggcctttattatattgaggtaggttccttttttgcctaacttgagagtttttaccaggaatggatattgaattttatcatgtttgttctgcatctatttgatgatcaaatggtttttgtccttcattctgttttttatcgatttgcctatgtcgaagcatccttgcatccctgggataaatcccacttgatcatggtgtattgtcttgttgatgtcttgttggattcagtttgctagtattttgttgaggatttttgcaactgtgttcatcaggtatattggcccrtaggtttttggcctataggtttttttctttgtcatatccttgtctggttttggtattgaggtaatgttgacctcatagaatgagttaggagaatttttgctcttcagtcttctgaaatagtttgagaggaattggtattcatttctaagtttggtagaattcaataataaaacagttggcttttctttgttgggagagtttttattactgattaaatcttgttaatgaagaaaaaactcgctctcttcaggttttctrtttcttcctggtataatcttggtaggttgtatatgtccaggaacttatgcatttcctgtaggttttccaatttgttggtgtatagttgttcataaaagtctcagatgatcctttctgtttctttgatatcagttgtaatgtctcctttaccctttctgatcttatttcagcttttctccttttttcttgttagtctagctagaaatgtatagattttcatcttttcagtgaaccaattttcttgtgttatttattagtctctatcttgtttagttctgycctgatctttattatttctctttttctactaattttgggttttgtttgttgcttttctagttccttcaggtgcattgttaggtagtttatttgaaatcttcttacttttctgatgtacaaaaaagtacttcttagcactgctttggctgtatcctattggttttagtatgttgtatttccattttcatttgtttcatttttttatttccttcttaatttcttatttgattcaggggtcattgaggaacatattgtttaatttccctgtatttgtacattttccatagttcctcttggtattgacttctacttttcttcctttgtggtctgagaagatacttgatacgatttttttaaaatttgttgagagttgttttgtggcctaacacatatggtcaatcctggagaatattccacgtgctgacgagaagagtacatatttcgtaactgttgaataaaatgttctgtaaatgtctgttaggtccatttggtctgcagtgcagtttcaatccaatgtttctttgttaattttctatctagattatctgtccaatgctgagaatgaaaagtgttgaagtctccaactattgtatttaagtctgtctctccatttatatgtaacaatatttgttctgtgtgtgtgtgtgtgtgtgcrtrtgtgtgtgtgtgtgtgtttctgcgttgggtgcatacatatttagagttgttagaccctcttgctgaaatgatcccttcatcattacataatcaccttccttgtctctttttagttttttatttaaattctattttacctgatataaatatagttactcctattcattgttggtttccatttgtgcaacacatatttttctatccctttactttgtttattgtacctttacaggtgaagtcagtgtcttataggaagcatatagttgggtcatgtctttttaatacattcaagctgtctgtatcttttaaatggggaatttaatccatttacattcaaggttttattgttagatgaggacttatttctggttttttttttttacatgttttaagtttgttttgtatattctttattcttttcttcctctcttactgtttattattgtagtttgytgggwttctgtagtagtaacatttgactcctttctcttattgtgtgtctgctctaccagtgagttttatactttatgtgttttcatggtggtagatatcatccttttgcttccagatctaggacttccttaaatatttcttgtaggaccagtctagtggtgatgaattccctcagtttttgcttatctgggaaacattttatttatttttccttcatttttgaaaagcagcttttctgggtacagtactcttggctgacatgttttttttctttcagtagtttgaatatatcatcctattctctcctgtcttgtaaaaagagaaatccagtgttagtctgatgggattcccttatatgtgacttgacacttttctcttgctgtttttagaattctgtctttctttgactcttaacagtgactataacgtggcttgaaaacctttttggattgtatctatttaggaacgttttgatattcctgtatgtgaatgtccatgtctcttgtaagatttgggaagtattcagctattattttgttaagtaggttttctatacctttgcccatattgtcgccttctgggactctgaaaattcaaatatttggtagatttatggtgtcaaaactgtcttccagttcttagattatttcttgtatttgatctaatctgttgtttaaatcctcagttgtgttttttatttcattcattgaattcttcagtttcagaattttttaaatgatatctctgttgaatttctcattcggatcatgagttgtgtttctgattgttttaaaatttttagctgtatctcattttgctttaacatttttattttgaatcctctttcaggcattttacagatttctttttcattgcaatctgttgctggagaattattatgttcttttgacagtgtcaggtttccttgccttttcatgtttcttgtgtctttatgttgatatctgcacatctagtgaacagttgcttcttccagttttatagattggctttcatagggtaagacattttcctaaatatgtatctatagtgttggttgggtaggttgatttggctttgattctggttgggcatactcatgtagttgtcatatgatttcattggctgtcatcagaattagtggtgtctgttaattcctcagttgcttgggctgcagttgttagtgaaaggtatagtgaggctttgctgaggatgggaatgtcaggagggctggtcttcaggcagcaatagtggtggtggtggtgggctggatgtgcaccaattcttggacccccaggtgacatatgcgggcactggtggtaagtccatgcaggctaacccttggacctccaggttgcttgttcagggaccaacagtggcagtggttggtgggtgggtgggtccttgggcagcatgtatgatgttagcaatgacggtagcagtgttgggacaacctagaggctcataagcaatacatactggcaccagtggttgtagcagtctgggcaagccagtttcctgtctcccaggtggcacatgtaggttgatgttggcagcagtagtggcagcaggcggggtgggcctgatgtcatgctctcaaaaggcaggtgcaggtgctagtgttggtgggtgggatgggttgattccccaygtcctcaaatggtgtgcttgggcagtggaagcagtggcagtgggcagagtagacctatcttcaggtttctttatggtacatgcagtcactggcagtgggcagggcaggcctgttttcaagccccctcccccgcaccacaatggtgcatgtaggcaccagtgacagtgatgggatgagtcagtcccaaggaccctagatggtgtactcagatgccagtgaccaggggagacctattctcaggctcctcagtggtacatgtgggcaccagcagtggtggccagataagccagtcctgaagctccttaatgtttcactcaaccacaggctgtggcagacaagcagatcaatcctcagggccctggacagtgcactcatgcagtagtgggtaagatgggcctgtccttaggccttaggatggtgcccaggttggctggtctctgggctcctcaaaggtatgtgcaagtgcacattggctttgctgctgggagcaaggaagggctgctgtcagtgacagtggacctaggaagttggctctcaggctctggtgagcacacactttggttctggtcccattgtcccagaggcagcctccccagtacacatcactgcccayttcccaggtgcaggacagtatgtgggctagagtgctgcaaacctggkcatacctgagtctagccggtgcctcaatgctacagccctctgggctgatgttgggggaaatgtcagcagggctccagtgatgtggacattcaggggctattgtgccccagagaagcatatcatttcttgtgactgggctctcaaagtgacrtcatgctacagctgcttgagtcttgggggatgtgggatgcagcgcaaactacctgtctggaacagtgccactgcatggactccgagaagtccctatactagtctcagggtccataaggactgaggggctctcctgtgactaggactgtaggagtccatcatgggagagcagactgcttataaacctctcactttaaccttttccctgcactggggagtttctcttggctctttgtcaatcctggctggctggcaacttttcttccctctccttctgtgtctcagaggttccctgtcacttctctctgaattctaatgttctctcttaaatgctgtattcaatatgtgattatctacttgatattctggtccttctttgtggaggtggtgagtgctggtgcctctagttagccatcttgaaagcctcctccccaccgtgaataatttccagaaaaatataaatggctaaaatcgacataagaaataaaaaaaaatkaaatagtccagtaaccccacagagaaaattcaaacagtaatcaaaaatagaactcctgaaaggaagcacttggttttatttacgagttctacaaaaccttcaaaaacatgtaattcctacaagcttattctaacatgagaatatacaacaagccaagtaaattcttaatttggtaaaataaaatatcrattctttccatatattttcacttttaaaatgatgattcattgttgtgacctaatacaagaaagactgtggaacatttatataaatgttaacaattgattactaaaatttttatttctattaacgtaactctgaggtaagttatttaacatacttccttatcttgaaagttacattcattctcctcaaagctacaaaatatggtgcttctaaaatacagcattagaaacgatatttttccccaattcttaaagctgcttattgatcagatttgtccaaaggaaatgttattttaaaataaacataaagaggattgtatcaatattttacacatttatgtgtaggtgaaatagcatgaatttgaatgtgytgaaggcaactttgaccagggtttaaacctgtaaagctgtagaatacgaataaaatttttcaattatcaatggatttgaactaatcaaagcatcatacaggacaagaacacagtaatcataaatatgtataagctgttgcatgtctttgttagtgcttccatatctcatagaaacctatcaatcctaggaacatttcacaaattagaaaaggttataacaacatcaatatgttatagtacttataattatctgtcaataactgatccaaagtatgatttaagatgaaactccattcaagatttttttagctttaaatgctttttttgctgtaaatttgcatattcattctggtagcacattcagaagtcttctgtgaaaggtaatgaagtcccaggaacagcaagttttttatttagatcttacatgtatagacagaatatgtgtacattttgaaatctggatcaagtccagagactgtcagtttgtcatcttttgttgagtggaagccaatttcatttaatagtgctaaatgatgatgctaatataagtcaaattggcaaatgataaattataaaattgtcattgagaatgacagaaactaagtggtattcattcttctgaatatctttctgaaaacttgattccaagttagtaacacttttataagttaaccatctatcaactaagtaacactggttgggttgaagtaaaagttaaaaattgtcaatatgacacttttcaaatctgttatgtatattgtccatttagacttgtgatatgacattttaattttataaagtgactccaaaaaggggccaacaaataaaaaaaaaagactaaacatcttacaatgtttcatkatggctctctccaagatgcatgattcttttatatttttaattgacagataacaattgtgtstgtttatggggtacaatgtgatgtgtgtatatttgtggggtacaatgtgatgttttkatctatgtatacattgcagaaagattcccttgagctaattcacatattgttaccttaccaatttattttttatgatcataacawtaaaaatcttttttgaaggccaggagcagtgacttatgcctgtaatcccatcactttgggaggctacagtgagaggatcacttgagcccaggagtttgaaaccagcctgggcaacatggcaaayttgtctctacaaaaaaaaataaaaacaaaaacaaaacaaaactagccaagtggggtggcatgtgcctgtagtcccactacttgggaggctgagatgggaggatcacctgagccctggaggtcaaggttgcaatgagccatggttgtgccattgtactgcagcctgggtgacagagtgagatcctgttttacaaaataaaataaaaagataaaaaataaaaatctattttgaaatatacaatacattgctattaatgctggtcatcatatagtgtaaatgatcactaaacttattcctacggtctaactgaaactttgtatgttttgatcagcatcttccctttccccaccactatcacctccagcctctgtcatcaccttcctgtttctatgaaatcaatttwaaaaaaatccatatataacaagtgagatcatacagtatctktctttctgtacctagcttctttcacttagcataatgtcctctagttccatccatattgtcacaaatgaaaaaattttcttatttttaaaggctatatatataatatctcattgtgttcatataccatattgcctttatccattcaaccattgatggacacttaggttgctccataacttggctattgtgaaaaatcttgaaatatatgggagtaccaacatctgcttgacatatcaatttcaatccctttggatatatacccagaagcgcaattgctagatcatatggtgtttttagttttttttaagaaacctccatactgttttcaaaatggctgtactaatttgcattcccagcagcagtatacacaggttcccttctcctcatatcctcaccaacacttgttctttttttcttttttgacattagtagcyattctaacaggcatgaggtgatatctcgttgtggttttaatttgtgtttccttggtgattagagatgttgagtgtttttcatrtatctgttggcatctacctctcttttgagaaatgtctgctcagatacttttaccagcttttaactgagttttcttactattgagttgtttgaattccttatatattttggatattggccccttatcagatgtatggtttgtaaatattttctcccaattcatggtttatctcttcactgttacttccttcttttgctgtccataatctttttcattcattgcagtctcatttatctatttttgcttttgctgcttgtgcttttggaatcctagccaagaaatcattgcccaggcaaatgttgaggagtttttccctcctcctcaagtttcaagtcttgtgcttaacatactatcttttatccattttgagttgatttttatatgtggtttgatgtaagggtccaattttattattctgcacatgaatatccagttttcccaacaccatttattaaataaattggaaaggacaataaattgttctttcccattgcatgttcttggctgctttgttgaaaatcaactgaccataaatacttggatktgtatctgggctttctatcttgtaccattcttcartgtgtctgtttttatgccagtactatgctgcttttgtttcaatagctttataatatgttttgaagttattgtgttgcctccagctttgttccttttgtgcaagattgttggctctctagggtattatctggttccatattgattttaggactgttttttctrttttgctaaaaaaaaatgacattggaattttgataggaattgcaatgaattagtacattactttgggtagtatgaacattttaacactactgtttctactaatccatgaatatgggatatctttccatttatttatttttwaattttattgattgattgattgattgagacagagtctcactctgttgcccaggctagagtgcagtggagtgatcttgactgacggcagcctccaccccccgagttcaaatgattctcctgcctcagcctcctgagtagctgggattacaggcgcctgccaccgcacccagctaatttttgtatttttagtagagatggggtttcaccatcttggccaggttggccttgaactcctgacctcgtgatccmcccgcctcagcgtcccaaagtgctgggattacaggcgtgagccaccgtgcccagccgatatctttccatttatttgtgtcttctttaatttctttcatcaatgttttacagttttcagtgtataggtttttcatctgtttggttaaatttgctcctatgtattttcttttttggtgctrgtataaatggaattgttttcttaatttttttttggataagtttttgtatgttgattttataacctgcaactttactgattttataagctgcaaaatcaaccaaatttggttttgcaacctgcaaatttatcagtttgaacaattttttgttttttctgtatgtaagattgtgtcatcaacaaacagaatttcacaccttcctttcctataaggatactttttatttcttttccatrtataattgcactggctaggatttccagtgctgtgttgaatagaagtgataagagtaggtatccttgtcttatttctgatcttagaggaaaaactttcaacttttcacaaatgagtatgacattagctgtgggcttatcatatatggcctttattgtgttgaggtatattccttccatatttttttgagtttttatcatgaccagatgttgaattttgtcaggtgctttttctgcatctrttgagatggtcatgcagtttttgtccttcatcttgttaatacactgtatcacacttattgatttatatatgttgaaccatacttgcgtttctgggataaataccacttcatcatggtgaatgatcttttttaatgtgccactgaatttggtttgatagtattttgttgaggatttttgcatctgtgttcatcagggacattgggctgtaattttcttttattgtaatgtctttgtctggctttggtatcagggtaatgctggcctcacagtgagtttggaagtacgtcctcttcagtttgttggaagggcttgagaaggattggttttactttttctttcagtgtttggtataattcagcagtgaaaccatcagatcctgggcttttctttttgattatttattcagtctcctttctcattattggtctgttcaggttttctatttctttctttcctgacttagtagactgcatgtttcttggagctcattcatttcttctgggttatccaagttgttggtatacagctgttcatagtagtagtagtatgttgtgattctttgtatttctgtggtatacagttataatgtctcctctttcatttctgattttatttgaatctkctcttttttctttgttagtttaccaaaagkttagtcagttttgtttatcttttcaaaaaccaacttttagttttcttgatctcttctgttatttttctaatatctattttgtttcctttttctctattatttccttccaagtttgggcttattcttctttttctagttccttgaggtgtaatgttagattgtttatttgagatattcttttctgaagtaggcactttttaccatatactctcttaggactacttttgctgcatcttatatgttttggtatattgtgttttcatttttgtttgtcacaaggtatttgtaaatttcatctttggccaattggttgttcagaaagatgcttcatttatacatgtttgtgagttttccaagattgttcctgttactgatttatagtttcatgccatcgtggtcagaaaatrtatgatttcagtcttcctaaatttgttaagacttgttttgtggcccagcatatcatatgttctgaagaatgttcaatgtactcttgaaaagaatttatattctgtttctgttggatgctgatgctgtaaaatatctgttaggtccatttttttaattgtagtttaaattgatgtctcctcattgattttctctttagatgatccagtgttgaaagtgggggtaatgaagtctactaccattattgtattgcaatctctctccccttcaaacttattaatatttgctttatatattcatgggctccaatgtttaatgcaaatatatttaccattgttataacttcttgatgaactgaaccctttatcactataagatgaccttctttttctcttttcatagtggggtttcactgtgttagccaggatggtctcgatctcctgaccttgtgatccacccgcctcggcctcccaaagtgctgggattacaggcgtgagccaccgcacccagcctttttactaaaagtatatcttgtctgatggaagtatagctatctccaatctttcygtttctatttgaatggaatatctttttcccatccatttactttcagtctgtgtgtcctcagaggtgaagtgagcctcttgtacacagcatgtagttgcgtcttccagacaagtgattctaaacaagtagcatatagtaacatagtccactagtctgttataaccatgatagctaggcatctggccgggggtacatccatgttttacagggcctgaagctgatataatttgaggaattttttttttaagaaaaaggatttacattttcaratacaaaattagataccagaaaggacttctacaagtaagtggaaatgaagcttaagcttcattagcttcatggaaaattcatctctgtatctggcacatagtaaacattgcatagttatttgcagaatgatttttgattagctaatatctgttgattaaaactaatgttacaatgagtatgactaccctgctggtggccacttgtttgcaatttcttcagtatatttagacttaacagtaccttagcattagtctcaatgagctttactccatgtccattattcctgtatgtgctagcctactcaggtaaaggacataaaaatgaaatatacagccaagtgggttttattttcttgattcatttagactatgaccatttcccagacatttgttgtcttaatccgttttctgctgctacaacagcataccacagactgggtaatttayaaagaaaacagatttattcagttaacagctctagaggctgggaagtctgagagcatggtgctgggatctggtaagagtgatcccatggtgaagggtagacggcagagtaaacacatgagacagagaaaggaaattgggccaaattcacttttacaacaaacccatttttttgataactaacccactcctgtgataacagcattaatttgttcatgatggcagagacttyatgacctaatcctctcttaagggccccaccttccaataccattgcattggcaattaagtttcaacatgtgttttggtgggacattcatatcatagcatttaattgtgtaaatcaaacatttaaactaaattcctaggctaaatctatcaaaaattattaaaygaagtcagaagatagccacttgagaggtgatatagatactagatatgtctttcaccagatcctaaagcttaattaactctgtcagacctcaggggcatggaattatagagatatactcttgaatgcattttgcttaagtccacattcaaatatatgaataatgaggaggtccacaagtgaatcagcaaataaatggactgcatagtatgtttccaaacagattatgaaattaagactttcatgggagagatataatatcaatttaagaactattaatgtttgccctcttagccagtacctgtagtcccacctactcaggagactgaagcagaaggttcacttgagcccaggagtttgaatctagcctgggcagagtaaaacatgatcttttttatttttatgttttaatttgccctcttcaaatcgacgaccccaattccctagaactttttttaaaatacaggggagaaatcagagaattaaggaagaatgcaaaaataagagacagaaaatgttccagaaatcatttgttgaccacagatcttatagcccacacttacgtctaaacataaagtactcataatagtaccacaaatagaaccatctatatatgggtatgtttcttgtttcttttctttctttttttttttttttggcttatatggttgtatatcagtgttctatagttttaaaattaactagaataagttttagatattcttgaccatttgttttgacctattaattttaagatcagtttatcaagttgaggggattttgattagagctccactgagttttacagaatataktgggtcagaattgaaatcttcataaatgtattgtcttcctaggtataaacatgtgtatgtctgtattttaatcagatgttcatttatgttctttagtaatggttggtaatgtcttctcaaatgtattgcatattttttgctttccataataaatacaaagtttatcaaagaacagaaaacagggaaagccacctaactcattttataaggccagtgtaatcttgataccagtcaagggcagtccaagtaaacaaagtcacagactattcttaagagcatagatgtaaaaatcttaaatattagcaaagttgaaaaaagtatatattttcaacttaccaaattcttctctgaatataaggatctattatgaaagtatcatgctattcttggattaaaaattaaaaaccacatgattattttgattgtacattttagttgcccccagtttttcactgttataaacaatgctttaattaccaatcttggacactgtcccatcatttccttagggagatttaccaaaagtatattttaaattatgatatattgttaaaatacagggccagcaaaccttctctacaaagggccagatagcaaatattagagatttgtgagccaagaggcaaaactgaagttatcatgtaggtacttatataacaagacagaaaatttccataaatctttattgatgaaattaaaagaggacaatttttgtgatatagctctrtatatgtgaagaatggaatccttttcagaggaggtaacacttcacttaattggatttgaaagctggtgtttcctatcatcaaaatctttagctgacgttcatctgttaatgcttatctacaatgagattttacatacttcacctttgaaaatgtctttccacatatataagtactgccaaatactgatatcaatccatgagtatatgcttttaattgagtatattcaacagactggcaggcatttttagaattctattagctaaaaggctagaatgccttttagcatgtcattacattgcaaatcacttccaattaaagttcctcaattgcacagttaaatggattttggaatatgtaaatttcctttgcacttgcatcaaggtctgaaaaacactgctgtagtttgaaatcagaaaatatattgctgaaaatttgtgtaggaatggagattaaaaaaaaaaaacagaaaaaaaaaaaacctttcgacagtgcaggaagtatgtgatgcagcctgacattacttgcaattcaaacaatgttctcgttgaaatgaaatgattttatcacagtatgtttcacgtataagcactgttttacattgtaactttagcttgaaaccttttcaaatctgcagcaaaagctaatttcaaagccactcagcattcaatagcagtgattgagcacagttcttccaaccattaaaaatgtaaaaaccattcttaacttgaggactgtatcaaaagcaggctagatttggcccatgggccatagcttactgatccttggctctataaagtctttaccggccgggtgctggtggctcacgcctgtaatcccagcacttttggaggctgaggcgggcagatcacaaggtcaggagtttgagactagcctgatcatcatggtgaaaccccgtctctactaaaaatacaaaagctagccaggcgtggtggtgcgtgcctgtaatcccrgctactcaagaggcagaggcaagagaatcacttgaactgaagaggcagaggtttcagtgagctgagatcatgccactgcactccagcctggcaacagagtgagactctgtctcaaaaaataaattaataaataaagtcttaaccaattatattcccagtaaatgttacatgcctgttttcccaaaactttgcaacctgtaattattatttacttttaaagatttatccaatttgaaattacatttttcagcttgcatttatttgcataaggtcacatatcttttaatgataagccatttatatttatttcttcactgtaaactggttgttcatattcttttcccatttttatttcaataaaattttcattccaacaatcattccgcgtagcaaaaagagatctaaatcctttttagtgactccacttgttcagtattatttttcactgctttctcccacacatccaacactccttccatatcgaaagatctgccattgtcagagagagttgtgttttctcaagcttctctgcatatctgcaccagatgtcattcattccctgtcagtcaccttttctccattttccccctcttatagtractcttattcacccttcaagactaccatcagagatcagttcctcctctttggctccacagcactctgcacatatgtgctataaaatctatcatacttttttgtaattaactattggtttacagtggtctctctccccactgggcatacagctttctgagatatggtattataattgatcgccatactccaaaacagtgcccagcaattagtcagtactaattatttgagttcaaaatactagtaatattaataataacaaatatatgccatatgcagcaacaaatctgtttagtatcccttgtatcgtgcttagcataatatacaattaaaatttgaagacacactcttggatattaatgtcttaccaaagaaaaatagcaattaacatttttattccctgacaaaactttgtcaaacactttattaaaaacttgtatttkccctcacagcttaaaataatttatttaaatacttgcctttagttatagctgtgatctccaattcagaaaaatttgcttatactagaaaactaagaaacttaaaacacagaaaagaatatttacaaactgtttctattttgtaatctggacaataagtttccttcaaaatcctccttgtaacttgggcaaggttcattttgaatcaatcttttattttgctttatttcctcaggatattcattaccttgcactagataaaggtgaattggcactagctgaagtggcaagaaaaagagctagtgacattgatgcagaatcaataacctctggggttggtaagaattaacrctatttttaagtgctttttattttaatcaatagttagtatcatttctatttatgtttggaggacatggatggttaatttgaattactttgtttgtaaagacagtgccttataaaaagaagaattaagctttgacaaacagcacaatgttgatacacaagttggaattgtgtttatgtgaaaatttctaatcagtgattactatagtcatcatttagcaaaaagtcaaaaggatattcttttcataagattttgggagaaagagcttagtattatcatagtgctgttactaaaattaaccaacacagaaatttatataatcctttatttatacacagacatgtcatttctcaaaagaattctctcctatatcaggcaaagtatttcatatgagattttgggtttgatgggtgattgtttttgtttagaagctgctagaatcattttaaaccayagtattctgaagaagacagatcagaagccttagaatgaatttgaaagtccatttaaattttataacataaaaaatgaaagtttataaaaattactgtaatatcaatgctaacatctttttttaaaactcagtttatctaatgctgctaaattgagcaatattgatacttacaaatccaattccttttcttcctgagtatttattattcctaaagtaggcaaagaaccctcaggattgtactagaattcatttttctgtggaactcctctgaaacaaataagttttaaaaagatttccacttttaagtgcttgaaaaatcttatacaagcctttccattgacagatcttgtgstttgtttttgtaatgctgtttgcagccaaagggaccaattgtcagcttctctctgatgccaccacatagatctaatcttcaaggtggtactgaaggactcaaagccattccagcagggtagctctaaacctgaataccagggctgacaggtactagcaagataatcccattctccttcccccatcctgaaagagttccagattgattagaccactttcatatctctgtttctaatggatagggaatactcactattaatgcagtattggataagaataactgtaattgacctatcactatatcttgttactttctagggagggatattaatgtgtgtactactactaataatagcacttaatatttattgaatgttaagttacagataactaattttcaccacaactctgtgaagtaagtacaatttatatttgctatgagaagtcacttctaactaaatgatgaaagcataccatgtttataggaatgatgacgttatatgatggggaaatatcctccatccctatccctctagccatttaggaaaacaaagcaggaagttaagtcctarccaattttctgggaattttccttagttgtcctgtaccctgccttttattccagggtatcagatataatgagggccatctttgcattttaaagctatttaaaattagtaagagtgaaagagaatgtgaagagattatcacaaaatttcagcaaaatgaagaaactccccarttcaccaaaatgcatctcacttcctgtgtattctctgatgaggttactgtggccagcggataattcctagccagaaagcttagtgtacccactttgagccctgcgtcatttctagcaaatatattttcactgataccctgtgacttcccttttctcagccttgtctcaggcctcagcctttgacctagattactatgttttgacaaagatactattaaataacatcagtaactttcaagaggttkccctattacatgaatgttctactccagttttgctgcagaaaactgggtgattctcactcataattccgaatggaattaacaaagaatttcttgtttcctcatcatggtctctacctagttcttttttgcagcccacatcatgctggggaaagctaattttctttcaaattccctcaatttaattcaattattctcttaaacttatcccaaagctgaaagttattaaatttttggctttcaaagtggttctttgatgcaagcaaggagccaaattatgtgagatagcaaaagagtagttccatttacatgggaaagtctgtaaaaaagcatcagacataaatactgccaccatagttaaaagcaagaggcgccaaaggaaaagctggatgatgataatctgaacaatttggtaattttttaaactttttattgaagtctaacatgcatacagaaaagtgcacaaaacataagcatgtgactcaatgaatttcacaaagtgaacacatccttgtaaacagtatcctgaccaagtaacatatgttaccaggaccccagaagccttcctatacccacttcaagatgctataatctcagcccagctgtccagatttgtaacattatagactaatttgccttttttcaaacttaaatggattcatacctatattcttttgtatttggctccttttattcaacattatgaatctgagaatctttcgtatkttgcatatagttataattcttccactcttcttgctgtataacaatattccaatgcatgaatgtacttcaatttattctactttagatggatatttgggttgtttcaagtttggggctaatgcgaatagtgttgctatgaacattcttgtgtatgtcttttaatggacataggtaggcagatctgtttgactgtgcttagaagttgaactcctgtgacgtaggatatgcagccttagtagctacttccagttttccaaagtagttgttaacaatttcccttctcaccagcagtatgtaagagttccagttttggccatcctcaatgatgcttgatattgtctctcttttttattttagccattccggtggaaaaggtattgtaattttgtatatgtgacagtataatatataggctgtttctggatcatgttctattttattactctgtttgtctatacttgcacaaatatctcactgctttaagcaactctggctgtcaatgttattatttagtagtgaaaattgcccagctttgttctttaagatagacttggctatccttccatataaatctcaaaatcagcttataccctgactcactcaaggaaaaaaaagaaacaaaaacagtgggggctgaaattctggttagaatctcatttaattcatagatacatttgggctgaatttatttctttataatattgttttccaatccatgaatatgatctatccctccatttatttaggtcttctctatttcttatgaaaaatgttttgtagttttcatagtagtggtcttccacatcttcctttagatttaagtatttctttttctcctttgtatgtggtaatcttatttttaaatttcattttctgttttatttctggtatatatacaattgactgttgtatatattgaccttatatctagcaataagtgataaattcgcttattaatgccaacagttagtaaattcttttgaattttctgcatccacatcatgtcgtctggaaatgtgttagtctctttgcattgctataaaggaatacctgagactgagtaatttataaagaaaaaaggtttattttggttcaaggttcttcaggctatatgagaagtatggtgctggcatctgtacctggtgaggcctcaggaagcttcaaatcatggtagaaggtaaagggggagatgccatatcacatggtaagagaggaagaaacagagagaggaggaggacccaggctcctgtaaacaactagctctcatgtgaactaacagagcaagaactcagttcttaccatggggagggcaccaagccatgtaagagggatctgccttcatgacccaaacacctcccatgaggccctacctccaacatgggggattacatttcaatatgagagttggaggggacaaacatccaaaccatatcagcaaataaggacattttaattccttcctttctagttcttatgctttttacttctctttccttattattgcactgactagaagctctagtataaagataagtagaagttgtgaccggcattattttctatttcttgattcttagggaaagctttcaataattcaccagttagcataaagttttccccaggtttttaataaaccttttattcatattaataaagttcccttcagtaactagtttgctaagagtttctatcatgaataggtattgaattttatcgaatacttctcctgtgcctatcaagattatcatgatctttctcctttgttctattaatatcgtgaattgcattgattttcaaatggcaaactaaccttacgttccagaataaatacttcttaattgtgatgatgtatttttacatattcctgcatttcatttactatttttaaatgttggcatttacattcatgagggatcagacttacagactcatggttttgcttcaatatctctgcctagttttgatatctagattattttgacctaatgcctaaatgtcaaacatctagaaaggatacatttgaacatgtaatagtactttatgatccagctctttatatatggcatatgtaacacttcctacaacttaaaaattttacattaatcttgactgtattaatgtgaatattttggttgtaacattgtattaaatttttgtaaaatattatcattggaagaaactggataaaagagacatgggacttctccattatttcttagaactgcatattaatatataattatctttaaaagtttaatttttaaagtttatattaatatagtgtcctatgttaagtactgtgacaaacattaccttatttggtcctcccaaattatctctaaaggagaaactactgtattggtgaattttttagaagttttyttctttaataatttcaacttttattttagmttcasggggcatatgtgcaggtttgttacatgggtatattgcatgatgctaagatttggggtatgaatgatccccatcacccaggtagtaagcaatagtacccaagaagtagtttttcagcccttgctccttgcccttctattagtccccagtgtttattattcccatctttatgtccatgtgtacctaatgctttactcccacttacatatgagaatatgtggtatttggttttctattactgagttaattcacttacagtaatggcttccagctacaactatgttgctgcaaaggatgttatttcagtcttttttatggctgtatagttttccatggtgtatatatactacattttcttcattcaatccatcattgatgggttcctaggttgattccatgtctttgctattgtgagtagtgctgtgatgaacatacaagtgcrtgtgtctttttggcaaaacaatttattttcctttgggtatatactcaggaatgggatcaacgggttgaatgatagttctcagtttttgagaaatctccagactgttttccacagtggctgaattaatttacattcccaccagcagtgtataagcattcccttttctccacaacctcacagcatatgttattttctgactttttaacaaaagccattctgactggtgtgagatggtatctcattgtggttttgatctgcatctctttgattagtgacattgagcattttttcatgtttgttgactgcttgtatgtctgcttttgagtaatgattgttcatgtcattttcatgctttttaatggacttatttgtttttatcttgttgatttcaagtttttcatagattctgcttattagtcctttgttaaatgcatagcatagtttgcaaatattttctctcattctgtaggctgtctgtttactttgttgatagtttttttgatgtgcagaagctctttggtttaattgggccccacttgtcaatttttgttattgttgcatttatttttgaggacttacttaatcataaattttttaccaaggccaatgtccagaaggacatttcctaggttttcttctaggattcttatatggtatgaggtcatacatttaattatttaattaatcttaagttaatttttgtatatggtgaaaagatatggctagcaagctattccagaaccatttattggatagggagtcctttcccaacttcttttcttgactgtcgaagatcagatgcctgtagatgtgtggctttatttcagtgttctctattttgttacattggtctctgtgtctgtttttgtactactactatgttgttttggttactgcagacttgtagtatagtttaaagttgggtaatggtgatccctccagctctgttcttcatgcttaggattgctttggttatctgggctcttttttggttccatatgaattttagaatggtttttgttctatttctatgaaaaatgaccttggtagtttgatagatacagagttgaatccatagattgctttgggcagtatggacattttaatgatattgatttttccaatccaggcacgtggaagtttttccatttgttggtgtcgtctgtgatttctttcagcggtattttgtagttcattcacttccttggttaggtgtattcctatgtattttattttgtttgtgtattgatattgtaagtgggattatgttcttgacttggctctcagcttgaatgttattagtatacagaaatggcactgatttttctgttgatttttgtatccaaaactttacagaagtcatttttcaggtctaggagtcttctggtgaagtccttagggttttctatgtacagaatcatatcatcagcaaagagagataatcttttcctatttggatgcctttaatttctttctcttctcctgatttctctggctaggacttccagtacttttttgaacaggaatgatgagtgtgggcatctttgtcttattcctgttcttaaggggaatgcttccagcttttgccatttagtatgatgttggctatgggtttgtcatagatggmtcttactttgaggtctgttccttctatgcctagcttgttgagggttttttatcaaggaggatgttggattttatcaaaggctttttccatgtctattgagataatcatatggtttttgtttttaattctgttcatgtggtgaatcacgcttattgatctgcatatgttgaaccaaccttgcatcccaagagtaaagcctgcttgatcatggtgaattaactttctgatttgctgctggattcaatgtgttagaattttgttgaggatttttgcatttatgttcatcaggcatattggcctgtggttttcttttttcawtgtgtctttgccaggttttggtatcagggtggttctggcttcatagaatgagttatgaaggagttccctcctacctgatttttggaatagtttcagtaggattggtacaagttcttctttatacatctagtataattcagctgcaaatccatctggtccggggctttttaaaaattggtaggctttctggctargcacggtggctcacgcctgtaatcccagcactttgggaggccgaggtgggcagatcatgaggtcaggagatcgagaccatcctggctaacacggtgaaaccccgtctctactaaaaatacaaaaaattagccaggcatgatggtgagtgactgtagtcccagctacctgggaggctgaggcaggagaatggcatgaacccaggaggcagagattgcagtgagccgagatcatgccactgcactccagcctcgacgacagagcgagactctgtctcaaaaaaaaaaaaaaaaaaaaaaaggtaggctttttattattgattgaatttcataacttgtttattgttctgttcagggtttcactttctttctggctcaatcttgggaggttgtgtgtttccaggaatttatctatttcctctacattttctagttcatgtgcattcagatgtttgtattagtttctaaggatcttttgtatatctgtgggatcactgataatattacctttgtcatttctgattgtgcttatttagatcatccttttttcctttgttatcaaatgagtggtctatcatacctgtttatcctttcaaagtataaacttttggtgtcgttcattctttgtatggatttttggatctcaagttcatttagttctgctctgatattagttacttcatttcttctgctatctttggggttagtttattcttgtttttctagttcctctaggtgtgatgttagattgttaatctgagatctttctaactttttggtgcaggcrtttagttctataaactttggagagatcttttttgtataggcaatgaaatgaggttacagtggaaatgctccataaattgcaaaaaattgagagccagtgctctatagcaattctaatcagttttctatggatatagttcccagattgaactccttaatataatagtgccataaaacactcagtaaaataaaatatatatggctaaatacttgaaggatatattaagacaaactaatttctttaaaaatttctggtgtacatgaaatgttctcagaaatcacaaacttaactgtttgtttatcttaacatttccaaaaattttgaccatacaaccctcatctttctcattgttctaggcaagagctataaattcacagaacttgagatttttataattcacatggggaaacttatagcttaattgcacagctgtaaatctttatccttactaataggcttagcatgatggtactagccattaaaatagtaataatcattcaattgaggtaaagaactcagatatttatactgytattatagtagtctccccttatctgctaatttcctttctgtggtatcaattacctgcagtcaaccacagcccaaaaatattatatggaaaattccagaaataaataattcataatttttaaatcgtgcactgttgagtagtgtgatgaaatctcacactgtcctattttgttttgtccaggatgtgaatccctttgtccagtgtacccacactgtatatgccacctgcccataagtcacttagcagccatcttggttaaaagatggactgtaatggtgtagcactgcttgtattcacgcaacctgtattttacttaataatgactccaaagcacaaaagtagtgatgctggcaattcagatataacaaagagatgcatcttatggtgctctcagtgagtaaaaaggtgaaagttctcaacttaataaggatatatatcatatgcggagcttgctaagatctatggtacattacatatgaatcctctatccatgacattgtgaagaaggaaacagaaattcatgagttgtgctgttgcacctcaaactgcaaaagttacagccacagtgtgtgataagtgcttagctacgatggaagtcattacatttgcaggtgaaagacacaaacagaaaggtgttcgaattgacagccatcagattcggtaatatctgctatttcaagcattcactgggggtctttgaacatataccccatggataaaggaagactaccatacctggaaaattcctctcccctcagcctcttccttctttcagttccacactctgagtgacatacagccaaatttcagaataggaagctctttgtccttgttaccccacagttaacataaaaaatcagaggtaaagacatgtgcagctggtaatgtctcagactttcttgacaaaactggagagattaaataagcattctcatgaggggttatattgccaaaacccatgatcactgtagaggctagataaacatctttattagggattatctatgctacaggcattgtctaaagaacttgctgcagaacaccttggtatgtaggagtcaaacatccgtcatcatgtcagttttgcttcaagatgacatcactgttgccatgcaacaggccattttcttacagaaattaaggcattcaaaagcagccatgtatacaggggaattgagaaagccacacacaggcccagtcaacacacatttcagaaaagacctgacaagaccataagcttttacctcaggccaattcctatgctcagagcaaacctagctaattagtgggactgtcccggcacacagctagtctgcaaagaccgggaaagatggctttttcaaatgcccagtttcacacacacacaccccacaaggcatacaaagaaacaggaaaacatggcctattcaaaggagcaaaattaattggtagaaatcaaacctgagaaagcacagacatcttactaactaggcaaagtctttaaaacagctgccttaaatatgttcaaagagtgaaaggaaaccatataaagaactaaagaatattaaaaaaaaaacacataagaacaaaatgaaaatatcaaaaaagaaaaattataaaaaggaaccaaacaaatcctgaagcaactgaaaagtcccataactgaatttaaaaatttactagagaagttcaaggtttgagtaggcagaagaaaaaaaatcagccaactttatgatacgatatttgaaattatcaattctaaggaccaagaagaattatgaaaagtgaactaaacctatgagatttatgggacatcatcaaatataccaatatatacattatgggagtcccagaaggggaagagagaaaggatcagaaagattatgtgaagaaataatgaycaaaaccctcccaaattttaggaaatacatggatccacaaatccaagatgctcattgaacagagaaaggatcagaaagatgatctgaagaaataatgaccaaaaccctcccaaatttgaggaaatacatggatccacaaatgtaagatgctcaatgaacttcaagtagaatcaacccaaaggataccttataatcaaattgttgaaagagaatctgcaagcagcaagagagaataaactcatcatatacaagggattctcaataatgagggattctgacttctcagcagaagctttggaggccagaaggtataattaaagtgctagaagaaaaataaagattaaccaagaattatatgtccaggaagactgggcagtcaaatataaaaatcagtattattataattttagtttgtaactctacttattattatcaacctgaattaaaacacaaaggcataaaaataattataaagctctttagtaggtacacaatatataaagatgtaatttgtgacatgaataacaaagtaggggaagtgacaatgctttataagagtttttgtatacacttgaggttaacttgatatcaatttaaattagattgttgtaactttagaatgttatatataattcccatgataaccacagagaaaataactatcgagtgtgtacaaaaggaaatgagaagggaatcaaaacatgtcacaactaaaaacaaaagaaggcagcaatggaggaaatgagtaacaaaaagcctatatgtaaaaaacaaaacaaaacaaacaaaaaaacagctctaagacataagtccttctctcagtaattacgggttaactgttcactgtctgaaatgcttgttaccagaagtrttttggatttggggtttgtttggtggtgtttttttttttttttcaattttggaatatttrcaggtacatactgagatatcttgaggatggtacccaggtctaaacacaaaacaccttacacacatagcctgaaggcaattttatataatatttttgataattttgtgcatgcaacaaagctgtctacattgaaccaatggaatgtaaaggtgtcactgtctgagccacccrtgtggacaatctgtaattgtttggcatcaccatcattcctgactgaatttatatgctaccaataagcagtcattttcttacacattcattcataagtacttaagagtaaacgtgtgacataccattactacagtaaaaaaatgtgttcaggataactaagtagtacagtagcatcatcagaatacctgttatcagctgttacacaacagcaacaacaaacaatggcaagctttctgcctctacctacaatgttgtgttctgagtaaaagattactgcatagggcattttatttttctgggtgagaaaaacagcagcagcagttaaagaatccggaagtgggtcatctagggataagaaggaatcctgttcgatggcattttgaagtgtttcctttagagttatctgcctcattaacaaaggtttttgtcttacaaatttctttttggttttataaactgacatgatttcttgttcatgctgctctagtctttcaataagcccatcacacattttcacagtgtcacttccaggcactttttctgcagtgttaacagtttcatcatcactattatcataatcaccttgattcagaaccattttggctatttcaccattggtcaatgaatgaacaactggatgctcattagtgatgttaaaaaccacttcaatatccatctcttccagcttactgatggactctgaaggtatatttgttgcatatgtaaggaggtcagacatttttctctcacttgacatacagaatccttcaaagtcaccaccttgtttatcatcatcagttaacgtaatcacaggccagagattgtgccagtcacgcacaactgtgtctttagtcatgtgttcaaagtgttggcaacagcacatgtggcatccttcatgctaaacatccttttgaaaaccttctgcacccatgcttctgctcactgctgataggatgctctttaagaaagtgtttttatatttactcttcattgatctaaggatacccaccctggtcacatggctgaattaatgaagtcacacttgggggaaaatacatggcatgaacattttttaatgagaatttcagatggaagatgagcagaagttatcaaggaataacaaaatcttgcagtcatcacccaggccagcttccctgcagtgagcacaaaccactggtataaaatgtttatgaaaccgaccaggaaagatggccctggtgatccatgcctttttgttagcataataatggactggtgagaaattcactcctggaaaatagcaaggatgcaaacttttgcctatcatagcaagtttataattatgtgggcctgctgtattaatatatctcagcagagttcttctgtcattggtatccttaattcatataggggctgtctcacctggggcagtaacaaaaacagtgatgtttcatcaatattatagacttgttctggtgtcagatttttatttctgatgaccttagtgaactcgtcagtgaatctgtccactgctttataatcagcagatgctttatcaccacaaatttttaaaacaactaagaaagcagaattgtaatgttcctaacacgaaaaatagtaagtgctaaggtgatggataccccagttatcctgatttattacatattttatccctatatcgaacatcacatgtacccataaatatatagaactattatgtgcccataattaaaagtaataataaaaatttaatgccatatcttccttaaatttctgcaaccagcttattgaatatccacagttcccttcaatttttagttcatcatgatctttgctggtttcatgatcagtataccattaagtggcatgtgttcactgcaatactgatggatctactcaatacatgatcaaaatcttcatttttagctttatggcatgcattgtttttctatttttcattaacttaatcacttttagcataaaacaacagtttatcctcctgtgtatacaagtcatttatagtggttgttccaacacccttctgctctccaagaygttttacagttacaccactgtccttttctcaaaaagctcgactttctgtgcaataaatataaatgcttcttctttttcttatcamtgttacccgtacaattatttaatatagactatttggacatttcatgaatatctttacaaagagcagagaatacacaaaacgacacagtgagtaatacacataggtcttggccttatgcagggtatcatggggaacctgacattggcacacctggcttgcacttgtgccattttattaacctttgtgggtgtgcttgtgtgagggcatctagctgtgtctggaaaagatatgacagctgagggggcgggggaaagtctttcttccttgggaacatttaataaactgtgcgtgcatgcatttttattgccacctgtcacaggcggtcagatgtagaatttccacttatgccatcaatattggcactcaaaaaaatatgaggttttggatcacttcagattttggatttttggattgaggatgctcaacctatgctttaaatgtaatggattaaactctctagtcaacttcacactgatagaagttgcagataggacttggcttgtgagttatgtgaataaggataactgaccgacacccatctcaaaataagtgaaaatgggaatacgtcactgcaatcatgggatacatactagcagcaaagaggggaaatgtggctgtacctcagaaatagctggacttattaaaaattacttatttgatttcggaatttgttattggtctgtttagggttttaatttcttcctggctcagtagtgggaggttgtgtgtttacaggaatttatccatttcctctagattttccagtttgtgtgcatagaggtgttcatcgtaatctgtaaggatcttttatatttttatgggatcagttgtaatgtcatgtttgtcatttcggattgtgcttatttggatctctctttttttcgttgttaatctagccaagctagcagtctaccaatcatttatcctttcaaagaaccaacttttggtttcattgatcttttgtatggatttttgcctctcaattttgttcagttttgctctgatattatttcttttcttctgctatctttggggttagttttttgctgtggttgttgttcctctatgtgtgatgttagattgttaatttgaactttttctaacttcttgatgtaggtgtttaactataaactttcctcttaatactgtgtttactgcacccagagatttcggtaagttgtgtctctgttttcattaatttcaagaaattatttgatttctgccttaatgcccaaartaattcaagagtaagttgtttaatttccatgtaattgtgtggttttgagagacctttgatattgatttctatttttattgcactgtggtctaagagtgtcgtttggtatgattttaattttttttttcatttattgagacttgctttatggccaagcatgtggtcaatcctatgtggtcaatcctagaatatgttgtgtgtgcagatgagaagaatgtatattctgtggttgttgcatggagcattctgtagatgtttattaggtctaattggccaagtgtcgagttgaagtctagaagttctttgttacttttctgccttgatgacctgtctaatgctgtcagtgtgctgttgaagcccccgaagtcccccattattattgtacagctgtcttagtcttttcataggtctagaagtacttgttttatgaatttgggagctccagtgttgggtgtatatacatttaggatagttaagtcttcttgataaattgaacactttatcattatatgatacccttctttgtcctttttgatgcttgctggtttaaagtctgttttctatgatctaagaatagcaactcctgctcttttttgttttctgctttcatgaaagagcttcagcacagcaatagaaactatcaatgaagtaaacaggcaatctacaaaatgggagrtgttcacaaactatgcatacaacaaaggcctaatatccagaatctgtgagaaaattaaataaatcacaagaaaaaaataacccaattaaaagtgggcaaaggacatgaactatgcaaaagaagacatacaagcccccaagaaacatgaaaaaatgctaatcatcactaaccatcagagagatgcaaatcaaaaccacartgagacactctatcaatcacaccagccatttgtgtgaggaaagtaatagagatggccattcaataagttttcccttaaataagactgtatttttatattgtgtcatttctagcataagcctgagaagtcagattgacatatgtctacagtacaatacagttatgaagtgaaatagtctaagctactgtaaaacaagagaccatgaaacccagtaacttcagcaagagaattttctttccttcttgtataacaatcctgggacgtgttccaggactggtaaggcatgctggtattagattactaggccttatctattgtgttactttgtcatctctagggtaaagccttcatctacatcattgaagatttgcatcccagcctacaaaaggaggaaaaaggaggcaggcatagtcctatcttgttcaggctacaacccaggagttgttacatatcacttctgtacatatcccattggacagaacctgttcctaaggctacactaaccataagaaagtctggggtgattatgcacccagcaaaacaccagttactgtaaaagcaaaagccatttggggacagctagcagttcatctgttacactgagatttgaagaatagcatttatttattttttagagacaatgtctcgctctgttgccacggctagagtgcagtggcgccatcatagctcactgcagcctcaaacttccaggcacaagcaatcctcctgcctcagcttcctgtgtagctgggactataggagtgcaacaccattcctggttaacttcttatttgaagaatattatttagaaaaagaaaaacatggagaaacaacttcttttatataatcctcatatgcagagaaatgaaaatataaaagaaatccttttcaaagacatcccagctgtacttaatgtggcggtctacaaatttgcatattatgaaatccttccaaatgcattatatttccaaatacatttatcatatatgatcttgcagatactatgctataaaaaagctgtagcattataagttgccatctccttttaaaatgtattttaaaattctgatataaaagcttattcatgcttaaatgggtaacattagagaatgtaatataaagaatgtaaaagataaagatcactcatattattacctggagataactgataaaaagagttattttagtgtatttaattcccttttttctatgcatatatttaacaaaattggaatcattatttatcttcctatttgttaccagagacatgtcatcactacattaccatgtcattttaaaaatcattcaaaagcttgattttttatgttatcttcttcctaaaatggcattaaagtcatgagcctaggtgcagtggctcacacatgtcatcccagcacttgcagaggctgaggcaggaggattgcttgagcccagaagtttgagaccagcctggacagcacagtgagacctcatgtctacaaaaattaaaaatttagctgggcatggtggcaaacacctgtaatctagctacttgagaagctgagatagaacatcatttgagcccaggagtttgaggtcacagggagttatgatcaggccactatactctagccttgactacagagcaagactgtctctaaaaatactttaaaaattaaaaatcatggtaccattgtaaacatatataaaaattctatccaagaggtgatacatggatgaaggtaaagatttgctcttatactttaaatatcttattgtaaatacaaaattcttctaaactgaagctacaaaagcagtttttaattctataaacaattgaaactgcggccaactctttaacttcctacactgtgcattacagggtgcgttatattatttgtttgacttaggtatattcctgccaatctacttttggcttcacttcacctttcctcctttattatgtaatgatgtcagttttgatctaaaccttactacctataggcatctttccctaaagacatcctaaatatttcataattatgagcacatcaaagactaactgcttgcttgactgcagaggtctatacaagactgtattacttgtatatcttaagagatgtacagttttcagtaawcttattaagtatgctatgattatcaaacctttgttcctttctttgtggtgacataatgtcaatcacagaatgtgacatatggtaattaagaattggtgttattgaataagtatggattttctctaaattagttattttcagatggaaactttccataatttaaatgttatttaacatatttttgaattctgaaatactagattactatattccaaaacaagttgtcaactcttcagaacttacctagtcataaaatgacagttactaagcaaaaggtagtggtcttttcctgtggagaaaggtacaaatgttaaatgttatgcttttagcccttctgtttttctttctgagacaggagttgaaagtctcaaacctctttctctgctttacttattagactagcaaattatgccaatctggggcagaataacccgtattcacattttctataagaaaataatgaaagaattttgctcaaggattggtatataacattaagggtaactaatgaaactatgtagttaaagaataaacagaatacgtgtccaatgtagctagtgtggagtataacaaaaatatcttctatcaataattccaaaatgtggatggacaagtagatttatgcagttatatggtacaaactaagaatatactaaggatgggccagtcatggtggttcatgcctgtaataccaaagactcaagaggccaaggtgggaggatagcttgaggccaggagtttgagaccagcttgggcaatatatcaagaccacaactctaccaaaaattttaaagctagctcggggtggtggcacgcacctgcagccctagctacttgggaggctgaggtaggaggatcacttgggccaagagtttgaggttacagtgagttgtgatcatgccastgcactccagcctgggcaacagagcgagaccctgtctataaaaaacaaaaaatactaagagtgatgggaaagctgaggtctagtcttggctaaactagtaaagactagccaaataacacttcaacagtccctttttggggtctcagtttgctctattataaaataaagatacagaagagtctgtcttttccagcagtaaaattttatgcatgtgattagatatgacaaaatagaatccaaactcaggcactataaaattctagccaacatataactctgtgaaaaaatcatttattcatatccatttaatagtacaaacaaacccatactaaaataataagcttgaatattctcttagaggatttccttagaggggaaattgctttattcaaaagatacttttaaattaaatcctcttagatactgcctttaaaagacgttatactaaatttaaaagtgtagcaaaaagcataacattaaagtgcccaagcagaggagctattatagaaacaagaatttctaaataaacagaatgatttaacatatattagctaacaaaactcataaaattatcgaactttagagctaaatttggacctcttacagatattttacatgtataaaattctcagtatgtcagaatttatatcaattctgaaggtaatcttcctatgcccttattatgtccctaggaaatctctattcacaaatgtttgttatgtagttggcctactaagtttctaagttacaatcatgtatcttgttttatcaaaattaaatgtcttcacctgtttttaccattttacaatttacaaaatggcttcatataaccataaatctatattctcaaggggaatttggaaagaatcagagtttttatagtcacttagtttccaaaggcttaaagaaaatgaaatgccctgaacccaggaggcggagcttgcagtgagcagagatcacgccactgcactccagcctgggtgaaagagcgagactccgtctcaaaaaaaagaaaagaaaatgccctactttcatagaaataataatcctataatacttttttgctatagggcagaatttaatttaaagctgatctatttcagctcccacatacacccatatatacacacacatatctttcaagaatatagatgtcagcaactcaaagtattccagtgctgcactgaggctgtattctacggcctcatgagtgccaattatgtgcatctcttcccaactgtatgttcagtgaccatgttggtagctcaaaattggccctggtaggaatatttatgtcgtggaaattggcaaactctacaaattggttgttttttggtttgggttctggtttggtttgtggagagctagttgttaatcatttaatagtgcataactgaagtaatgccaggtcatagttcatgaaggccatgtcttcacctatcaaagaaaagacctattactcccctattctacaaatacaagaactgaaattttttactttcacatatactattccaacttcctaggtttggactagaaggattaaaaaagggagtaaggtccatgtcatatatggtttgttgtgtgtctttaaacctgtgtagcaatgatgtccaatagaaatataatgcaagccacagacagaattttaaattatctgatacatcttagggtacatctcaaatcagatgttaaattttcattggaaatacatgatctatattcatatttcataaaatttacagttgaagtagtttgttacccaagtcgttgtacacattctttaaaatttcacaattactagatagaatatcaattttttaatttaattgaaattaaataaaattttaaaatgtagttccccagtcacatgagccgtgtttcaagattcagtagtcacatgcagtagtgtctaccatattggaaactgcagctttacaacatcaataattcaggagtttcccagaagcttaggcctttttctgtgctagcttatattgtagaatcaaaaatgaattatttcacttttcagtggtgtaattatctgagacaaaaataacctttgaagaatgagttgctaatagttattaatagctgtctaacaaaaaaatttgtattattgctataatcatgaaaaggttcacatgatataccacctgccattttgggcatgtcatcttatttaacaattaactcatgaagctgtagctgcattttgttktttttttttttagaaaatatttatttttaattttcatttgagactaggggaatgcatgtacaggtttgttacaagggtatattgcctaatgctgaggwttcggcttctattgaccctgtcacccagagagtgaatatagtacctaacaagtttttcagcccttgcccctctctttccctctttccttttggagccaccagtgtgtgytgttcccatatttacatctgtgtatacccagggtttagctgctcctactttataagagaacayagaatatttcattttctgtttctgcattatttcacttatgataatgcctccagttgcatccatgttgctgcaaaggacatgatttcattcttttttatgactgactacatagtattccatggtgtatatgtaccacattttcattatccakttcaccattatgggcactaaggttgtttccatatctttgcacttgtgagtagtgctacaataagcttacaaggccgggtatctttggtagcacaattttcctttgggtataaacacggtagtgggattactggatgtaattgtagttcaactcagtttttttagaaatctccaaactgctttctactggggctgaactgatttttgcattcccaccaacagtgtataagcattcccttttctctgtagccttgccaacatctgctgttttttaattttttaacaaaagccattctggttggtgtgagatggtatctcattgtggttttgatttgcattcctctgatgattaatgatattaagcatgtttttaatgtttggccacttgtatgtcttcttttgagtagtgtcttttcatgtcctttgcccactttttaatggggttattttttttttcttaatgatttgtttaagttccttatagattccggatattagtcctttgttggaggtgtagtttgtaaatattttctcccattctgtaggttatctatttattctgttgatagtttcttttgctgtgcagaagttctttagtttaagcaggtcccgatatttcatttttgttactgttgtaattgcttttgaggatgtctatcaagtcataaattctttggctgtgtcaatttccacaagagtatttcttaggttttgttctaggatttttatattttgaggttttacattcaagtcttattcatcttgacttaatttttgtatatgttgagaggtaggggtccagcttcattcttctgcatatggctagcctattttcccagcatcatttattatatagggagtcctttccccattgcttatttttgttggctttttgaagatcagttggttgtaggcgtacagctttatttcagcattctctattctgttccactctattctgtatatctgtttttgtaccagtaccatgctgtttcggttactgcagtcttgtaatgtcgtttgaagtcagatagtctgatgcctccagctttattctttttgcttaggattgctatggctattcagcctctttttaaattccatgtgaattttggaatagttttttctaattctgtgaaaaatgaccttggtaactggataggaatagcatttaatctgtggattgctttgggtggtatggacattttagtgacattaattcttccaatccatgcacatggaagtttttccatttgtttgtgtcatctattatttctttcagcagtgttttgtggttcttgtggagacctttcactttcttggttaggtgtattcttaagtattttattttgtgtgtggctactgtaagtgggattaagttcttgacttggctctcagcttgaacgttattgggatatagaaatggcactgatttttgtacattgattttgtatccaaaactttacagaagtcatttatcaggtctaggagtctcctggtgaagtacttagggttttctacatacagaatcatattatcagcaaagagagataatttgacttcctttttggatgcctttgatttctttctcttctcctgatttctctgactagggcttccagtacttttttgaatgggagtgtgggcatctttgtgttgttcctgttcctaaggggaatgcttccagtttttgcccacgcagtacgatgttggctgtgggtttgtcatagatggctcttattattgtgaggtttgttctttctatgcctagtttgttgagggtttttatcaagaaggatgttggatgttatcaaaggctttttctgtgtctcttgaaatgatcatatggtttttttttaattctgtttatgtggtgaatcacatttattgatttgcgtatgttgaaccaaccttgcatcccagaaataaagcctgcttgatcatggtgaattgactttttaatttgctgctggatttgatgtgttagaattttgtcgaggatttttgcatatatgttcatcagggatgttggcctgtggttttctgttttcattgtgtctttgccaggtgttggtatcaaggtggttctggcatcatagaatgagttaagaaggagttgccttctacttaatttctggaatagtttcagtaggattggtacaagttcttctttgtacatctggtttaattcacctgtgaatccatctgtgccagggctttttttgattggtagcctttttattactgattcattttcacaacttgttgtttactgttctgttcagggtttcaccttctttctggctcaatcttgggtggttgtgtgtttccaggagtttatctgttccctctacattttctactttgtgtacattgaggtgtttgtatcagtttctgaggatcttttgtatatctgtgggatctgttgtaatgtctcctttgtcacttctgattgtgcttatttggatcttctctcttttttctttgttaatgtagctagtggcctattaatcctgcttagcctttcaaagaaccaacttttcgtttatcctttatattatttttggtgtcagtttctttagttctgctctaattttagttatttagcttcttctgtcttcacagcattttgaagaagagcttaatgatgtttatattagtggtaataaatgctaagcatttatggagtacttttcatctttgaagggctttacaaatagttattaatctgataacataaaaatatatcatttctgttagaagtgaattatagagccaaagagggcatttcttctcaacaaaaaccatgagtacgcttgtcatacattctatactacaatgtacataaacttgtgttaatatcttattcctgaataagacaaaatattcatattaactaagttttctgattctaagtaccataataaactaatcacagagaaaaatgattcttctttaatgtttatcacctgtgtattgtctacaaaattaacaaaagccagccacagctttcttgattatatrtactttaaaatggcatttttatgttatttatcctctcaactgccatccaaattattatatcatccattttgtagacattccagctttcaaagggattacttgcatcatttttttaagagatgaaatcttgctctgtcacccaggctggaatgcagtggcatgttcatagctcactgcagccccaaactcctgggcttaagcaatcatcctgcctcattttcccaaggatctgggattacaggtgcaagccacagtgcccacttcatttaatattgttatctcaacaacactaaaagatagatggtaacaggtgttgttatacccatttattcttttcgatgaaactcaggctaggtgacttgctcaaagttaacatactgattggtgcaagaactagagccagaatctaggtattgtgattttagccacccttatttagtatttactgtatgatggagaatgtgttgaacactgttcatacattatctcattttatggttacggccacctcacaacatatctattttacccatgagtaaaaattatgatgctgagagactgttacatataggtctttttaccctaagcatatgttcttaatttttataatactatgctgaatctacaaatggaatactgggtaggttggctgggcacaggagatggctgcacctcctgcagagttaaccttggctgagcaagaggctccagggctgggcaccagatcaacctcatacccctaagtgagggcatcattaatgtctgtggcctgcaagtcgaggcatgcaggcagtcactgggtcaacatctgagcactcctggaccagaaccagtgcattccagaattcttgaattgaggatactaagacagggattcataatgccctctgcttgatgtgctggtggttgccaggaggcttggcttcagattcagaggaagataccaaaaaactgatcgtttccttgaattggcttttctatttacttcgtctgtgtctctcatattgaatatcctaagagagatgctggaatattttggcgttcctctagaagaagttttaccgattggagaaaataaagaatgtggatcaagtaggaatatcatttgtattattgggaaaatacttccattagaactttgtagaggacttaattttgagttggtcccactcttgaactgtgtagactctgtggatttatggttccatcttttgctgatattttctgtgtggcaaatgatgaagaagccagctagctctgattttttaatagtatacagaaaaaagaaaagaacaaaattgaatttttccatattttgcaactaatttgggatccattgtccctaccctaagacataacaaaccggtgaaaaaagatctgcctgcaaatgaagctgcaatttaaaaaagtagttgtccttgaagttaatttttgttttggctgtcacattgctgcaattgtggaaatgcaggaacttaaaaagagtacaaattctagctcctttggcttgaacgacaggcccattagtttgagacaaatgccaacatggggggctgctcagatgagtttccaacttaaagtcagatcagtttccaagttcaatgctttcttttcctccttgcttccttctccaccaccaccacttcctcctcagttttcttctctccagcctccatattcctcccgtacaaccaggatctaatatttgtaactcagataatccagctactgaaataaacaaagagcatgcaggtgctagtaagaccaattataattatcattaaaaaaagccagagaaatatattccaaacatattggatgttctaaaggatatgaaaaaggttaagcttaatgtgattgaatggtcacctagcagcaaacccattcataagaggaaaagacaaaattcatattaggacccgatgtctttaatatctcatgcacttatgcagaaatttgcatttcaagattcttttgagaaagtaaatacatcttgagagtcttccccattttctagttcaataayttcaaggtttggacatcacatttcgcagtaaggacagtgaactaaagcaaaactgataaacacagcagctgttggccaaggtatcagcaacaaaatctgtgtctaaacttagaagsaaagattgcaaaaatacaccagcctgtctttcactacatttcaaaggatcttctcttctgttaaatgaagttaaagaaactctgtatgctggaatatgctagtgtggaggtccgaaaagtctggactcttaagaataccttgtctcaaagtccttggccatgcctatggtctgaatggtatttcctasgtttgcttctagggtttttatggttttaggtctaacatttaagtctttaatccatcttgaattaatttttgtataaggcgtaaggaagggatccagtttcagctttctacctatggctagccagttttcccagtaccatttattaaatagggaatcctttccccattgcttgtttttgtcaggtttgtcaaagaccagatggttgtagatgtgtggtattatttccgggggctctattctgttgcattggtctatatctctgttttggtaccagtaccatgctgttttgggtactgtagccttgtagtatagtttgaagtcaggtaacgtgatgcctccagctttgttcctttggcttaggattatcttggcaatgtgggctcttttttgtctccatatgaactttaaagtagttttttccaattctgtgaagaaagtcaatggtagcttgatggggatggcattgaatctataaattaccttgggcagtatggccattttcatgatattgattcttcctatccatgagcatggaatgttcttccatttgtttgtgtcctcttttatttcatcaagcagtggtttgtagttctccttgaagaggtccttcacatcccttgtaagttggattcctaggtattttattctctttgaagcaattgtgaatgacagttcactcatgatttggctctcggcttgtctgttattggtgtataggaattcttgtgatttttgcacattgattttgtatcctgaaactttgctgaagttgcttatcagcttaaggagattttgggctgagatgatggggttttctaaatatataatcatgtcatctgcaaacagggacaatttgacttcctcttttcctaactgaatactctttatttccttctcttgcctgattgccctggccagaacttccaaaactatgttgaataggagtggtgagagagggcatccctgtcttgtgcgacttttcaaagggaatgcctccagtgtttgcccattcggtatgacactggctgtgggtttgtcataaatagctcttattattttgagatatgtcccatgaatacctagtttacatgtggtttttgtctttggttctgtttatatgatggattacgtttattgatttgcatatattgaaccagccttgcatcccagggatgaagcccacttgatcgtggtggataagctttttgatgtgctgctggattcagtttgccagtattttattgaggattaaaacgccaaaagcaatggcaacaaaagccaaagttgagaaatgggatctaattaaattaaggagcttctgcacagtgaaagaaactaccatcagagtgaacaggcaacctacagaatgggagaaaatttttgcaatctacccatctgacaaagagctaatatctagaatctacaaagaacttaaacaaattcacaagaaaaaatcaaccccatcaaaaagtaggcaaaggatatgaacatacacttctcaaaagaagacatttatgcagccagcagacacatgaaaaaatgctcatcatcactggccatcagagaaatgcaaatcaaaaccacaatgagataccatctcacaccagttagaatggcggtcactaaaaagtcaggaaacaataggtgctggagaggatgtggagaaataggaacacttttacactgttggtgggactgtaaactagttcaaccattgtggaagacagtgtggcgattcctcaaggatctagaactagaaataccatttgacccagccatcccattactgggcatatacccaaaggattataaatcattgctgctataaagacacatacacatgtatgtttattgtggcactattcacaatagcaaagacttggaaccaacccaaatgtccatcaatgatagactggattaagaaaatgtggcacatatacaccatggaatactatgcagccataaaaaaggatgagttcatgtccattgtrgggacatggatgaagctggaaaccatcattctgagcaaactatcacaaggacagaaaaccaaacactgcatgttctcactcataagtgggaattgaagaatgagaatacttggacacagggtggggaacatcacacaccagggcctgttgtggggtggggggagggaggatggatagcattaggagatatacctaatgcaaatgatgagttaaggggtgcagcacaccaacatggcacatgtatacatgtgtaacaaacctgcacattgtgcacacgtaccctagaacttaaagtataataaaaaataaaaataaaaactagttacgcttattttttttgtctttttttttttttttcctttttctggagaacaaggcatcatgctacctgacttcaaactacactacaaggctacagtaaccaaaacagcatggtactggtcccaaaacagagatatagaccaatggaacagaacagagccctcagaaataatgccgcatatctacaactatctgatctttgacaaacctgacaaaaacaagaaatggggaaaggattccctatttaataaatggtgctgggaaaactggctagccatatgtagaaagctgaaactggatcccttccttacaccttatacaaaaattaattcaagatggattaaagacttaaatgttagacctaaaaccataaaagccctagaagaaaacctaggcaataccattcaggacacaggcatgggcaaggacttcatgtctaaaacaccaaaagcaatggcaacaaaagccaaaattgacaaatgggatctaattaaactaaagagcttctgcacagcaaaagaaactaccatcagagtggacaggcaacctacagaatgggagaaaatttttgcaacctactcatctgacaaagggctaatatccagaatctacaaagaactcaaataaatttacaagaaaaaaacaaacaaccccatccaaaagtgggcaaaggatatgaacagacacttctcaaaagaagacatttatgcagccaaaaaacacatgaaaaaatgctcatcatcactggccatcagagaaatgcaaatcaaaaccacaatgagataccgtctcacaccagttagaatggtgatcattaaaaagtcagcaaacaacatgtgctggagaggatgtggagaaataggaacacttttacactgttggtgggactgtaaactagttcaaccattgtggaagtcagtgtggcgattcctcagggatctggaactagaaataccatttgacccagccatcccattactgggtatatacccaaaggattataaatcatgctgctataaagacacatgcacacgtatgtttattgcagcactattcacaatagctaagacttggaaccaacctaaatgtccaacaatgatagactgggttaagaaaatgtggcacatatacaccatggaatactatgcagccataaaaaaggatgagttcatgtcctttgtagggacatggatgaagctggaaaccatcattctcagcaaactaccgcaaggacaaaaaaccaaacaccatatgttctcactcataggtgggaatggaacaatgagaacacatggacacaagaaggggaacatcacacaccggggactgttgtgtggtgggggtaggggggagggatagcattaggagatatacctaatgctaaatgacgagttaatgggtgcagcacaccaccatggcacatgtatacatatgtaacaaacctgcacgttgtgcacatgtaccctaaaacttaaagtaaaataaaatttgaaaaaagaatatagaatcaatcaaaaaattcaaaaaaaaaaaaaaaaaagaaaaagaaaaagaacaaaataaaacaaaaataaaagaatacctcatctcttgttttggaagatccagcaacatattactgattatagttaggtgtaaggattttttttcatgtgttaatattactgaaagttgaatatatacttcaaatagttttcctaagcaattgtgacttgctaatttaagagcctttgaatcttttaaaaattggcagtgatctgatgtacatgacctccagcaacttggagattttcagaagataaaagtaaacttttttcattaagaaagtcatagtttgagtcatatatgttgagccttctaaaacttcttcctgagatgataaattattcttagcaactgattttgactattaaatgatacaagtagtaacatttaaagaaagactcttctcaacaaattttgctatacttggtatgtaaatatgtatgcctgtcatttttgtttcctttgttccctgttagatttatactctgttcctttgtaaatacagtgtaaaataaatgtaccttttgaacttgaaataaataaaaatggaatattatcaaggttagggaatataggaaccaatcttcattaaaaataactactattagcacatgctatttgcaagccataatgctaagctctgtaattactatcatatttcatatttacaactacagagttaaatattagttttcccatttacaaatgaggacacagactcagactgtcagtggcagattttgaaaccatgcctgtttgactacaaatctcatactctaaatcactttactagtctgctttttaagtccactgccatttcccatattttttaccaccataatgttgcatgttacagattagttgtgtggttcttttttaattttggcatagaaaagatagcaagaaaggttttctttgtcttgtttaccatattatattaacaatgctacaagcaagtgcttacaccacttacatagcacagtgcagcaaagtagctttgagccctgtatcatacaatcactgtaacacctttgcatggtatcatactgacaggttttaatactaatgtggaactggaggtttttaccttagaccttgatctaagcaattccttcagttatgaaatggaaacttctacaattcctctagaactaaaggaagttgttcattcagtgggcattttaaagctatatttataataaaatatgagatagaggataaaacattgcttatcatagctaaataatttacattaatggggactgttaattatgtgcatagagtgattccttttccttaggaaaatttttttctacattacctgaatatccttctgagagcctcactttattttgccttattaatcaaaaaagaagtgtttggagctattctaggttacttagatgttcataataatgctttttcataacaaatcatgtgttaagttccataaacactttctggccaaattttctgttaactttcaattagttctttcttctttattttctggctaaattccacttacagtagatagttaccatgttgtgcataagactgcttccaagaaagaagtaaaacaagtttgtacatgtacattcatatgaaaagacaaaatgtgaaagagaaacataatatttctagtaaaactctacccttatctagaattaagtatactcataaatgtatgttctacagtaatacagagagattactcttccattattttgtaaagtgtgtaatttttccaagctaataatctaggtatttgagatgcattcatttaagcagaaggaatagctgggaaatattttcatgtcaggtggtatgcatgctaggtttttataacctttcttctgtttattcgatgtaaggtaacttaatgtgacagggtgtgacacatcacaaagatgactcaggtcaggaatttcaagaaatcttgaaaacaataccttaaaatgatttaaataaatagtattttaaggttgtatagaatatatagtcttttttttcctatcaaagaatttagttcaaatgcttaggaaaatcttttactcaaaaaaaggaaaatatatggcaattgaagggaggaatccctaggtttctctgggttagagtcccttccagcagacacagctatttagttagagtttacacattccattgttgaccaaaccattctagtaataaaattatgttttcctcatctacctttatttttctaaagcctctgcagtatatttagctgtcatcacaaactcctgttccaaagcatgggatttcaacatagagtatgggtagatgagttgataacaagatttgctttggaagagccaaattttgtttctattatagtgaatatacatattgtaagtgttcaactcaaagaattttgactaagtgaacacacacatataattggcatccagaccatgaaactaaattttaccagcactccaaaaggctcttttgtcccatcttcttatactgcaaaggattaaagttcctgccttctaatactataaatcagtttcacctggttttggaagagaattacacatccttatccagaaataagttcattcataaatatatatactgtagtaatacacacagatgactatttgcacctttctgtgtgttggcagaggtagatgaggaaaacataattttattactattatgtttgtgaaatgcacccatattgttatgtatattatcccactgtataccacaatttgtttattcatttcatcattaagaaacatttgggttgtctccagtttgaggctattataaatattatcctgcatgtcctttgtgaatgtatatacccatttcttttgggtataatatctgggacttgaattgttgggtcttagggcatgtgttttttcggctttagtagatacctcttaggatttttccagagtaactatagcaatttatgttctcactgccaatacgtgagaattctcttacatccccatccttgccaacacttggtatcctcaacccccaaccaccactaccattttacttaatttgtatttttctgatgattcacaaagtttctttttatatgtttattgggaatttggatatatcttttgtgaggtgccctttcaagacttttgccttctgcctattgttctatagagttatcatccctattcttacactttccaagagttcttcatatattccttatacaaatcttttgttaaatgtatgtactgcagaacaaccccaaagtctgaaaagtattttttcattcctgagtatctttataaaaattattttaataggtttctttttttttttttagtcattgtaggttcacagcaaaattaagctgaaggtacagagatttcccctataaccccagttcccacacatataacagtcttcccctataacaacatccccttctagaatggtacatctgttacaattggtgagcctatatttatacatcattatcctccagaataataatttaatttacattagtgtttgctctttgtgttgcatattctataggtttagacaaatatatgtacaatgacatatatccaccatgtaatatcatatagactagtttcactgtccttagaatcctctgtgctctgcctgttcatctctctctcctccctagtccctggtaaccactgatgcttttattgtttctatagttttgtcttttctagaatgtcacatagttggaatcatacagccttttcagattggcttctttcacttggtgatatgcatttaataaggtttcttcatgtttttttcattgcttgatatctcgtttacttttagtgttgaataatactccattatctaaatgtaccacagtttatctagtcatcgactgaagaacaacttggttacttctgagttctggcagttatgaataaagctatgataaatatctgtgtgcaggattttgtgtggacataagttttcagttcccttgggtaaatatcaaggagtgcaagcattgggtcatacagtatgagtatgtttagttttgtaaggaagcaccaaactttcctccaaagtgactgtaccattttgcattcccaccattgatgaataagaatccttgttgttccaccgcattttatgtcatgagtgtgctagattttggccatcccaataggtgtgtagtcatatctccttgttattttcattattgaaaattgcatttccttaatgacatatgatgtggcgtatcttttcctatgcttatttgccatatgtatatcttctttggtaaggtgtctctttaggcctataacagtatttttggtgtaaactgacaactgattataagatgaaaatggaaatgcaaaggaccaagaatagttaaggcaattctgaagaacaacaaagctggaagacttacagtgctggaaatcaagaacttttacaagtctatagtaattgaatagtgatattgatgcaagaatagacaaacagaccaacggaagcaaataagccagaaacacaccccatatatagtatggccatatgatttatgacaaaggtgacactgtagtgcagaagagaaaggataatcttttaaataaatggtgctaggttatttggatatctatgtgattaaaatgtaagtttttaaacccccgcctaatagcatacacacaaagcgattccttatggattaaatagtttagaagcagagggccaatctcctgaaacatattgctgctaggtatttacctggccatgctatagccctgccaccatatgccacaattgtagtgagtcttatgtttcgcagaattcactcaatccttgcccacttactgccctggaataaggcctcttgtaagctccacagaaaagcacagactggattattactatttagtttctctttgccaggggagcctttatgtaactgtacgaatattgcctttataatggctagtttgtgagtgccaatcagattttcacaaccaaacaatatgctatctcgggattctcacacgtgagggtggtaaaacgttctctgataatatcattaggttaatgaagaatctaggtctttgctgattgccatctgtgtataagaaattatccaaatagttgcaaatgcattgcccaatttagtcaaaactcacccaacattcaagtatgaatagaattcataatcatatttgatagcaggtgagttgtttcgtcaaataggaattgctagctttctcatttaaaatgtaagacatcctacatatagacatatttatatttagtactgatacagtcatattttgtttaattaaggactaaaagattatacccattttatcttatctggttatagataattggtttgttaggatcattttcccatattttcttatgttttatatcaatcaggtattcttaaccctcttagaccttttcccccttttaaaacatatttcaaagaagatcaattttactttactcaaatcgaactcataatgaacacatgtatatgtacacatattattaatgacaatgaaatgtcataactttatagagaagagataaatggaaaataatttataagttaaaaaaatagattcatgtaacaattctatactaaaagacataaattatttagttgcttatacctgtacacaaaatcacagtaaatgttacagctacaaatgcagctgatacagctatgtgtagtgctgacttaaactatgataagcttcacctccaggcactgccttaagcatagtctgcaaactacctacctagatgtgccatctgctctatccactcctaaaattctaaccaaatgtactgcttcctataggtcttctcagatgaggagacagaggagttacgttgtcaccagaactgcaggtgaaacactaggtgcttgacatgataaacaaacagtgtatttaatatctaagccagaggcccttgctcccacattcctgatctatggccacgccagtgtcttgttttttaaargttgggagttgagggaatcctgttgtgctaaatccccacaagtctgatggtagaagttttaaagaagctaaacttaaacagtagaattgtaagtgaggaagccttccagacactgttaaaagtgtctgttactaaaactaactggtgatgttcttaagtccataaaatgctataggcacattacaaaggttggtctgtaatattaggagtaaacatatatatagagagatgaaactgctttctctctttagcctcaactgcatatgagtctctgtccaggcacaggtgaattgcctgcaagagtactaccactggaccaatccctaaaattgtatctttgagagcctggtggtgactcttataagtaatgttctctccaactatgggaaaggatccaacccagaatgggacagcccgcacccctcctcaaagatatttaaatgttcctaggatttgcaggttatttcatcacccatttttctaatgtcattgccctacctgatgaactttctcaaaaaaatacaaggttttgcttgagttctggtcataaattctctacacaattttaattaactgagataattaggaggaaacaacaagtggacacctacatatagcaatgcctgacctaatggagaaccttttagagtcaagcccctgaagataaggaatgcaggccaggaaatggaggggaagttatctaccaatacacctggttctatgtatcttttaaaaagctccagcaaagctttacttttgtgatacatgtacctccagcaaagacccasaacgtccaagaagttgctacatctgaactgtcttctaaatacctttaggaaactgttgctatggatgttataacaaacatgtcctctcaaggatgacctttaatcctgatagtggtagatgtgcttatcgaaatggctctattaccttcactgggcctattggctcctctgttctattagtatatcattcatcaaagttttctaccactattaacttccccacagcctattcccttatcccacagtttatgtatgcaattgtggaaagcattacaaaacagctgctttagctggaagaattcatattcttctattcaccattcagatgaagggaagagaaaactaatactacatgaatcctggaaaaatagttctacagcgacatatgatatagacaacactcctggttctcttatctcattgttgaaaaataggcatatactattcacaatagcaaagacatggaatcaacccaaatgcccatcaatgatagactggataaagaaaatgtggtacatacacaacatggaatactatacagccataaaaagaataggatcatgtcctttgagggacagggatggagctgaaagccattatccttagcaaactaatgcaggaacagaaaaccaaatactacatgttgtcacttgtaaatgggaggtgcacaatgagaacacatggacacagggaggggaacaacacacactggggccttttggtgggcagggggagggagagcatcaggataaatatagctaatgcatgcagggcttagtacctaggtgatgggttgataggcaaaccaccatggcacatgtttacctatgtaacaaacctgcacatcctgcacgtgtatcctggaactttaaattaaatttaaaaaaagaaaaatatgcatataataatgtactacattcatttatacatcactgcatagtaactttaacttccatacctgcattttgtctgcactactgggtaatttcacaaacccttgccaatcgacagctagaaagaacttcagacaaaaaaaaactamaacgactcagagtaaaccttctaatatgccaagcaataaacagtagttatcagaagacataatccaagttggagacaccattttcctccaaaacatatccatactatcaattttagctaaacatttcctagagccattcagggtcacagatgtaaccaaccacctaatattcagcctagagttgtttatgttcagtcagatttagcccccttctctttttctgctgatccctacttctctcattaagttctcaccccattctccaatcccagaagctaacaaattctcaaaaactccatggccagctctgaaattgatgataatgggaatcaatcagttttctaaaaccagaaagtgctaaaatacatgtgcaacttttattggcttaaaatctggcttcagctacccaaatctatgcctttaagttaaaacttaaggatgacatatttcaggtagcagaagaaggaggtgcagtcaatgtcgccaaaggcttttgttgtttgttgtgtttttactatacctttttattttttatttttttttgggagacagagcctcactctgtcgcccaggctggattgcagtggcgcgatcttggcttactgcaacctctgcctcctgggttcaagcgattcttctgcctcagtctcccgagtagctgggactataggtgctgccaccacccccggctaatttttgtattttcagtagagattgggtttcaccatattggttggccaggctggtctcgaactcctgacctcgtgatctgcccgcctcagcctcccaaaatgctgggattacaggcgtgagccaccgtgtccggcctgtttttactatatcttaatatgcatacattcagtgaaaatgatacatattttaattcattcacattagaattttttagatgtgtaaaaattatagaaaatgttggaagcaagataaataaccaaagttttaacaattttgttaaaatattaagtttttatcattcttacatcaatcactttaagaaaatacaagactactcttttaaatggaagaaaagtatctgcttgaggacttcaactttaatctggggttttcaaacactgatatggttgcatggccttttaaaagcctttgggcacaaaactgataaaatgtggttttacttattggcatgcctgtgcaacaaagcatttgagaggcatgactgacaggccggaagtatgtatgagggaaaacctatgcttatgtctgcttcagtgacttttttagccacaccctacttgtaaattgtaaactgtcattcagagtagcatagtgatgtttcaaacaagtcaggttataatacctctacttcttttgtcttaatgcccagaggtgaattcagaaaatgttcctatgttttggctcgtaaaagcatccatctggaaaatactaaataacaaaccctaatagtaaagagcattgcaaagatttatgacactatgcatacatgtaaattgtatatttaaacatcataattagctaactcagccttcattgtagttcagcacgtatttcaggttgaggacaaagaaaagcattctattgttttgtgtcaggttttaagccatattttaaaacatactattaaccctatatactgaattaaaattgcaattaataacaaaaacttcattggagatttttagtatctaaaaagaactatagaacaatctgtattttcgctagctgcagtggctcacacctgtaatsccagcactttgggaggccgaggtgggcagatcatgaggtcaagagatcaagaccatcctggccaaccaacatggtgaaaccctgtctctactaaaaaaatacaaaaattagctgggcgtagtgtcgcacgcctttagtcccagctactcaggaggctgatgcaggagaatcgcttgaacccgggaggcggaggttgcaatgagccgagatagggccactgcactccagcctgggtaacagagcgaggctccgtctcaaataataataataataaaataaataaataaaagaacaatctgtattttaaagcatgctgtattttatgagaaacatccaatttaactttaagatattaaacagaaacacatatatgttcccatcatacttttcttacaactgtacagttctgaactgaaataaggcatgaaaacaaatattagtttgacttttattaatagtgctaatatcccttcctgaatataagataacgctatcatatttctaataaaagtaatatatattcatttgtaaaattcatacagtacaggaaagcataatatattcaataaaaatgccccataatcccctccttcactgaccagaaactttacttaaaacaaaataatttttgtggtctaaatttcaataagggtagtaattcaaatgtatagcttttagataagtattaaaggttttaatccatttaccataaattatcaaattgaattctcattagtactcaaattttaaggtaaagagcattctgtataactgctcagtaaattagtactcaataatgatacttcaaatttttcatttctgaaggatatctccacagaggcaaccttaaggggacaaccttaaatagcctaatctttatcaaggagttcaattgtgggattcttgggtttttctttttgaggtggaccaaactgcaaaatgatgtctcaggaaccccatttatctgacaactaagaaaagataaacacctgtaagtcgatgtttaaagcccaaactagttttgaagtaacaagaaagagaaagctaatagttcaaatttcagtcgcttttcatctaaacccatcaatgtgtgcactggtccattaattatgtggctcagcacaaaatgatatgttagtcttcccttttactctaagatgacagctgagaggtaaagttttagttcaggagaaagaaagctatttcaaatactttatttgttggtctcaagaatgtacctaaatcatgaatgaaaatgaaaaattttcctaattgaggatcaaaccaattatttctttgatcactctgttagaacctaaataatactaaggtcaaggatttaaaactcatgatactaatacacccagcttttccagattaatgaaatattttaaagcagaggtaggcaatttatttttctgtaaagggccagatagtattttaggttttgtgggccacacagtttctgtcacaactacttgactctgcccttgtagtccaaaagcagccatagatgatagataaatgaataatcaaggctgagttcaataaaactgaatttatggacataaatataaattctatataacattgacagatctcagaaaattcttttgatgtttttccaaccattaaaaagtaaaaaccattcttacctcaaaagttaaagactaacaggcatcagcctggattttgtctgaacttagtttggtgaaccctgttctaacagattgttttggttcttgatttatagactgtacctatgcttcaaaggaaaaacgtatcactgaggtatttttttaaattttgtttaaagtatttgataggttcaagaatcctaccaattgccagaataattattggaagtaatgccatttaaaatatttctttcaggtgaacccaattcagtgtctttagaccacattttcattatagtagtccttagtagaaaacatcagttttcagtataaaaccttttgttccatttacttcattaaaaaatttcctaagctaataaatttttaggaaaaaaattaagtttggccatgttctacattaactattttatttatttttttttagttttttttttattaaactttaagtaagttctagggtacatgtacccaatgtgcagatttgttacatatgtatcatgtgccatgttggtgtgctgcacccattaactcatcatttacattaggtatgtctcctaatgctatccctctcccctcccccaataccacgacaggccctggtgtgtggtgttccccatcctgtgtccaagtgttctcattcttcaattcccacctataagtgagaacacatgcggtgtttggttttctatccttgtgatagtttgcttagaatgatggtttccagcttcatccatgtccctagaatggacatgaactcatccttttttatggctgcatagtattctatggtgtatatgtgccacattttcttaatccagtctatcattgttggacatttgggttggttccaagtctttgctattgtgaatagtgttgcaataaacatacgtgtgcatgtgtctttatagcagcatgatttataatcctttgggtatatgcccagtgataggatggctgggtcaaatcgtatttccagttctagatccttgaggaattgccacactgacttccacgatggttgaactagtttacagtcccaccaacagtgtaaaagtgttcctatttctccacatcctctccagcacatgttgtttcctgactttttaatgatcgccattctaactggtgtgagatggtatctcattgtggttttgatttgcatttctctgatggccagtgatgacgagcattttttcatgtgtcttttggctgcataaatgtcttcttttgagaaatgtctgttcatatcctttgcccacttttggatggggttgtttttttcttgtaaatttatttgagttctttgtagattctggatattagccctttgtcagatgagtagattgcaaaaattttctcccattctgtaggttgcctgttcaccctgatggtagtttcttttgctgtgcagaagctctttagtttaattagatcccatttgtcaattttggctttagttgccattgcttttggtgttttagacrtgaagtccttgcccatgcctatgtcctgaatggtactgcctaggttttcttctagggtttttatggttttaggtctaacatttaagtctttaaatccatcttgaattaatttttgtataaggtgtaaggaagggatccagtttcagctttctacatatggctagccagttttcccagcaccatttattaaatagggaatcctttccccatttcttgtttttgtcaggtttgtcaaagatcagatagttgcagatatgcggtattatttctgagggctctgttctgttccattgttctatatctctgttttggtaccagcaccatgctattttggttactgtagccttgtagtatagtttgaagtcagggttatttctgagggctctgttctgatccattggtctatatctctgttttggttactgtagccttgtagtgtagtttgaagtcaggtagcatgatgcctccagctttgttctttttgcttaggattgtcttggcaatgcgggctcttttttggttccatgtgaactttaaagtagttttttccaattctgtgaggaaagtcattggtagcttgatggggatggccttgaatctatagattaccttgggcagtatggccattttcatgatattgattcttcctatccgtgagcatggaatgttcttccatttgtttgtgtcctcttttattttgttgagcagtggtttgtaattctccttgaagtggtccttcccatccctygtaagttggattcctaggtattttattctctttgaagcaattgtgaatgggagttccctcatgatttggctctctgtttgtctgttattggtgtacaggaatgcttgtgatttttgcacattgattttgtatcctgagactttgctgatgttgcatatcagcttaaggagatattcggctgagatgatggggttttctaaatatacaatcatgtcatctgcaaacagggacaacttgacttcctcttttactaattgaataccctttatttccttcttttgcctgactgccctggccagtacttccaacactatgttgaataggagtggtgagagagggcatctctgtcttgtgccagttttcaaagggaatgcttccagtttttgcccattcagtatgatactggctgcgggtttgtcataaatagctcttattattttgagatacatcccatgaatacctagtttattgagagtttttagcgtgaagcactgttgaattttgtcgaaggccttttctacatctattgagataatcatgtggtttttgtctttggttctgtttatctaatggattatgtttattgatttgcatataatgaaccagccttgcatcccagggatgaagcccacttgatcatggtggataagctttttgatgtgcggctggattcggtttgcctgtattttattgaggatttttgcatcaatgttcatcatggatattggtctaaaattctctttttttgttgtgtctctgccaggctttggtatcaggatgatgctggcctcacaaaatcagttagggaggatttcctctttttctattgactggaacagtttcagaaggcatggtaccagctcctctttgtacctcaggtagaattcggctgtgaatccatctggtcctggagttcttttggttggtaggctattaattattgcctcaatttcagagcctgttattggtctattcagggattcaacttcctcctggtgtattcttgggagggtgtatgtgtacaggaatttatccatttcttctagattttccagtttatttgtgtagaggtgttcatagtattctctgagggtagtttgtatctctgtgggatcggtgttgatatcccctttatcatttttgttgtgtctatttaattcttcgtcttttcttctttattagtcttgctagcagtctatcaattttgttgatcctttcaaaaacccagctcctggattcattgattttttgaagggttttttggttctctgtctccttcagttctgttctgttcttagttatttcttgccttgtgctcgcttttgaatgtgtttgctcttgcttctctagttcgtttaattgtgatgttagggtgtcaattttagatctttcctgctttctcttgtgggcatttagtgctataagtttccctctccacactgctttaaatgtgtcccagagattctggtatgttgtgtgtttgttctcattggtttcaaagaacatctttatttctgccttcatttcattatatacccagtagtcattcaggagaaggttgttcagtttccatgtagttgagcggttttgagtgagtttcttaatcctgagttctagtttgattgccctgtggtctgagagacagtttgttataatttctgttcttttacatttgctgaggagtgctttacttccaactatgtggtcaattttggaaaaagtgcgatgtggtgctgagaagaatgtatattctgttgctttggggtgaagagttctgtagctgtctattaggtccacttggtgcagaattgagttcaattcctggataattttgttaactttctgtctcatggatctgtctaatgttgacagtggggtgtctgagtctcccattattattgtgtgggagtctaagtctctttgtaggtctctaaggacttgctttatgaatctgggtgctcctgtactgggtgcatatatatttaggatagttagctcttcttgttgaattgatctctttaccattatataattgccttctttgtctcttttgatctttgttggtttaaagtctgttttatcagagactaggattgcaacccctgctttttttttttttgttttccatttkyktggtagatcttcctccatccctttattttcaggctatgtgtgtctctgaacgtgaaatgggtctcctgaatacagcacattgatgggtcttgactctttatccaatttgccagtctgtgtcttttaattggggcatttagtccatttacatgtaaggttaatattgttatgtgtgaatttgttcctgtcattatgatgttagctggttattttgctcgttagttgatgcagtttcttcctagcatcgatggtctttacaatttggcatgtttttgcagtggctggtaccatttcttcctttccatgtttagtgcttccttcaggagctcttgtaaggcaggcctggtggtgacaaaatctctcagcatttgcttgtctgtaaaggattttatttctcctgcacttatgaagcttattttggctggatatgaaattctgggttgaaaattcttttctttaagaatgttgaatattggcccccactctcttctggcttgtagagtttctgtgaagagatctgctgttagtctgatgggcttccctttgtgggtaacccaacatttctctctggttgcccttaacattttttccttcatttcaacttcggtgaatctgacaattttgtgtcctggagttgctcttctcgaggagtatctgtggcgttctctgtatttccttaatttgaatgttggcctgccttgctagctggagaagttctctttgataatatcctcaagagtgttttccaagttggttccattctccctgtcactttcagatacaccaatcagacgtagatttggtcttttcacatagtccccatatttcttggaggctttgttcatttctttttactcttttttctctgaacttctcttctcgctccatttcattcatttgatcttcaatcactgataccctttattccacttgatcgaattggctactgaagcttgtgcacgcatcacatagttctcgtgccatggttttcagctccatcaggtcatctaaggtcttctctacactgttgattctagttagccattcgtccagtattttttcaaggtttttagcttctttgcratgggttcaaacttcctcctttagctcagagaagtttgttattaccgattttctgaagccttcttctctcaactcgtcaaagtcattctccatccagctttgttctgttgctggcaaggagctgtgttcctttggaggagaagaggcactctgatttttagaattttcagcttttctgctctggtttctccctatctttgtggttttatctacctttggtatttgatgatgttgacgtacaaatggggttttggtgtggatgtcctttctgtttgttagttttccttctaaaagtcaggaccctcatctgcaggtctgtcggagtttgctggaggtccactccagaccctgtttgcctgggtatcaccagcggaggctgcagagccataaatattgcagaatggcaaatgttgctgcctgatccttcctctggaagcttcgtctcagaggggcacctggccggctgtatgaggtgtcagtcagcccctactcagcgatgcctcccagttaggctactcgggggtcagggacccacttgaggaggcagtctgtccattctcagatctcaaactccatgctgggagaaccactactctcttcaaggctgtctgacagggacgtttaagtctgcagaagtttctgctgccttttgttcagctatgccctgccccccagaagcagagtctacagaggcaggcaggcctccttgagctgcagtgggctccacccatttcgagcttcctggctgctttgtttacctagtcaagcctcagcaatggcgggtgtccctcccccagccttgctgcccccttgcagtttgatctcagactgctgtgctagcagtgagcaaggctccgtgggcatgggacctgccaatccaggcatggaatataatctcctggtgtgccatttgctaagaccattggaaaagcgcagtattagggtgggagtgatctgattttccaggtgccgtctgtcatggcttcccttggctgggaaagggaattccctgaccccttgcacttcctgggtgaggcaatgccttgcccttcctcggctcacagtccatgggctgcacccactgtcctgcacccactgtctgacaagccccagtgagatgaacccagtacctcagttggaaatgcagaaatcacctgtcttctgcatcactcacggtgggaaatgtagactggagctgttcctatcccgccatcttggaacttccccctacattaactattttaaatgagttttaaatgtgtgtaaagttaatttacacaaattttaatttaaaaaattttaatttgtgtaaattaattacaccaaagaagttttaatctgtgaaactttyaattttaaattacatttaattttttgaataataaatacacacatggctcagaattccaaaggtttctagttaaagggtctactgccaaacttgttctgtagtcatccagtcttctcttcagaggcaaataatgttaactgttagaaacctaacagcctatattaggtttgcaattacatatgtatattctgtaaatatataacatttataattttatatgtatattaattttatcttaattttatagcatagccattgttttcaaaatgtactcttctttctaatgacaagttaatacattcacattacataaaactcaaacatttagaaaataagagatctgtataatgccaccaaccagaaaaggaatcttaacacagtacatattttctagcttttcccctttcacatatttttaacaaaatataatcatgcttcctgttttgcaaaatgactttttaaaaatttaacaaaatattttggaacgctatatgtcagtatacgttgactgaccccttctcttttttatagctatattattcaattgtatgaatatattacaatttaatcagtatccaattagtgggtgtttggattattccttgtttttactaaaatctgtgctgctagataattctaaaaagatgctgtcattgaagtattttaatcccctggaacctctcttaacagaaagagcaactacaataatgaacaccaatatccatggacagcatctacaacaagctttagtgacaacatattcttataaaccccaaaacataagtggacagggataaatcaccaacagctacaggacccactaaaaacttcatgaggtctagagggtccacagtgggtgttgaagcaatgtgatttctgtgcagtcctctgaatgccaacatgaaaaaattcaatgaggctcaggtaagtggcagtagcaactataggtctctcaaggaaccctaaagcttggtcatttaattagtgacacgcatgaatggatgaccaagattcctactgttcctacctactgtccagtgaaacctcagccaagggaatgagtatggcagaaacagctatgaaaggtgaacaataagtgtgagggagaacatttattctattttatggaataaagtgttatgcaattctacagttacaaaaagtaaaataattagaggcacccctgtgaaggagtgggatggaggcagccttttgggctgcctgtgaaatatatcactactcttactgtttttgtttttgttttttactggcccagtatggggagagtagaaagcaagccctaatgggctgttacttctggctgtaagcacccagtcacaccagccagatacaacccttgccagagccagggccaaatggggagttaaactggggggaagcagtgtgggagggtgcaggtatacctatgaaataataatgcaggtgttccaaggcaagctcagggagggtataaacctcctatggagcagaagggcaaaagctgacttgatcttgattttcagtataaatacagaccatgaaagcagagtctcacacaaacaaaaataacaacaacaacagcttcatgggagaaacacacggaaggtagggggacttctaatggtccagacagatgaaaacttcaactactaattggaagattttgtgaagtcattctcagaacagcagcagaaaatagagatgattctgtagattccaatttgtggatacaagaaaactgtagaaagtatggaggtgctgggatggtctagattctggatcctataaatgcttaagactaacaaatcaaaataatctttctagatgaatccccaaacttaggagaaacagttcagagtagagcccaaattgagcacaccaggcacaatgggggaaaaggaaaaagaatgtagaaattaaaggggtaaaatagaagaccatatttttctctatatgatgaacacaacaaactcagaagctccagacctatgcagataagaaagctttcttggcacactcacccccttaaaggtacagaaaaggcagttttccataaaaatgaacaagaacaaagggttgcaatcacatctcatacaaagcagcatttgaaaaacagaataagaataataatttccctatcaacaatgaaagcactctagaaagacatgcccacaaatagatgagaattgaccccaatattttaaaataatcttaaatacagtgatataagttatgaaagaataatgtaaataaggataacaaactcagaggtgattaaagaagattttttagagaatgaaagaataagaaacaaaaaaatcatgttagaaatgaacattaacttagaaggatcacaagactaagtaaacacaattgcttatgataactagagaatttaaaagaggaaacacttaaaaatgaaagataaatgaaaatggactcaagaaaaagtgctagagaaagatgataggcaaagaagatccaacatacataaaatgagaattcctagagaagaaaaaccaacgcaatacagcagaatcctgaaaaactcttaagaaaaatttcctgaaatagaaaaaaactttatagtagtaatgaaagagcacatcatgacctggaaacaccagcccaagttggtcgacatcaagacatattctaatgaaatcctctgagcattcagatgaaaagaccaagttcttataaatgaatgaaaatggattatgatcactttttgtcagcaacactttatgccagaacgcaatacagaaatatatttaagatactcaagaaaaaggtgagccaaaacgacctatttgcattaggtccattctcacattgctataaagaactaccagagactgggtaatttattaaggaaagaggtttaattgactcatagttccgcaggctgtacaggaggcatggctggggaggcctcaggaaacttacaatcagggtggtagggtgaaggggaagcaagctccttcttcacatggtggagagggagaaagagagtgaagggggaggtgctacagaaacaaccaaatcttgtgagaactcactgtcatgagtttgacatgagatttgggtgaggacacacagtcaaaccatatcactattatttccatgagccactactaggaaatctattggataatgagattcaaacagccaacatgacttgagacatctatgtaaggactagtgataagcataataaatacatctacatttaaaactaactgatgaagccagtcacaaaagggtaaatactatatgattccagtcatatgaagtaactaaagtggtcataactcatagaaacaaagtggtggttgtcaagagctggagaaaagggaggaggagaattagtttttaatgggtttcagttttgcaagattaaaaagaagttcaagcaatttgttgcccatcaatgtgagtatagtcaacactactgaagtattcacttaagaaaagttactatcttaaccatttttatgggttttttaccacagtaaatgaaaaactattagcttgtaagtaaattaaaaataaaactaaatgatggttaaagtgagataatgatacaacccaaaacaaataaaaatatagggagaataagaagagtagaataaaaatacaataagtgggatgctgagacaggaggatcacttgagcccagcctgcgcaacatggcaaaactccatctctataaaaagtacaaaaattagccaggcatggtggcacactcctgtactcccagcttctcaggaggctgatgtgggaaaattgcatgagtccaggaggtcaaggctgcagtgagccatgagccactgcactccagcctggatgacagagtgagactgtgtctcaaagaaaatgaaaaaaataaaattaataaaggactgccttacagatgctggctagaaacaagaagtgtattacttcatatctgacactgggagagaaaaaggataaagggggaaattggttactaattcgagtaatgctcatagtagagaaccaacagacagtactcctctaaaaatgacaggaaaaaaagaaagcaactggtgaatatctctgatgaatattgatgcaaaaatcctcaacaaaatactagcaaaccaaattgaacaatacattaaaaagagcgttcatcatgacccagtgaaatttattcctgggaggaaaggatggttcaaaatacacagatcaatgaatgtgatacatcatatcaacagaatgaaagacaaaagccgtatgatcattttcatttgatgccaaaaaagcatttgataaaattcaacatcacttcaggataaaaaccatcaaaaatggtgtagaaagaatatacctcagcttaataaaagccatatatgacagacccacagctggtaacataccgaatgagaaaaaaacgaaagcctttcctctaagtatggggacacaacaaggatgcccgctttcaccactgttactcaacatagtactggaggtcttagcaagagcaatcggacaagagaaagaaataaagggcatccatattggaaaggaagaagtcaaactgtccttgtttgcagatgctatgatcttacacttgaaaaaatttaaagaatccacacaaaagaactgtgagaactgataaattcagtgaagctgcgggttacaaaatcaacctacaaaaatcagtagcatttctatatcccaacaatgaacaatgtgaagaagaaatttaaaaagtaatcccatttataatagccacaaataaaataaaatacctaggaattaatttaaccaaagaagtgaaagatctgtwtaatgaaaactagaaaacactgatgaaagaaattgaagagaacaccaaaaagtagaaagatattccatgttcatggattggaagaatcaatattgataaaatgtccatactaccaaaacaatctacatattcaatgcaatccatatcaaaataccactgacatccttcacagaaatagaaaaaaaatcctaaaatttacatggaaccacaagagacgcagagtagccaaagcaatcctaagcaaaaagaatcatattaccttacttaaaattatactacagagctatagtaaccaaaacaacatggtactggcataaaaatagacatgcagaccaatggaacaaaatagctaaccagaaacaaatccacgcacctccagtgaactcattttcaacaaaggtgacaaaagcatacactgggggaaagacaatctcttcaataaatggtactgggaaaactggatatccatatgtagaagaatgaaactaaacctgtatctcttgccatatacaaaaatcaaaataaaatgactgaagacttaaatctacaacctcaaactaatacaagaaaatattggggaaatgctccagggcattggtctgggtagaaacttcttaagtaataccccacaagcacaggtaactaaagcaaaaatggacaaatgggatcatatcaagtttaaaagcttctacccagcaaaggaaacaatccacaaagtgaagagacaagccacagaatgggggaaaataccgcaaactacccatctcacaagggattaataaccagaatatataaggaatttaaacaactctgtatgaaaaaaaacatgtaataatcctatttaaaaatgagctaaagatttaaatagacatttctcaaaagtacaggccaggcgcagtggctcatgcctgtcatcccaacacttcgggaggctgaggcgggcagatcacctgagttcaggagtttcagaccagcctggccaacatggtgaaaccccgactcaactaaaaatacaaaaattatccgggcgtggtggcaggtgcctgtaatcccagctactcgggaggctgaggcaagagaatcgcttgaaccttggaggtggaggttgcagtgagccaagactgcaccattgcactccagcctgggtgaccagagtgagactctgtctcaaaaaaaaaaaaaaaaaaaaaaggcaaacgggcatataaaaatgtgctcaacatcactgatcatcagagaaatgcaaatcaaaactacagtgggatatcatctcaccccaattaaaatggctattatccaaaagacaggtaataagaaaagctggtgaggatgtggagaaaagggaaaactcatacactgttggtgggaatgtaatttagtacaaccactgtggagaacaggttggaggttcctcaaaaaactaaaaatagagctaccacatgagtcaacaatcccactgctgggtatctactcaaaagaaggtacattagtctatcaaagagatatctgcactcccatgtttgttgcaatgttgttcacaggagccaagacttggaagcaacctaagtgtccatcagcagatgaatggataaagaaaatgtatatatgcacaatggcatactattcagccataaaaaagaatgagatcctgttatctgcaacaacacggatggaactggatgaaataagccaggcacagagagacaaacttctcatgttctcatttataagagctaaaaattaaaatgatggaactcagagagagtagaaggatgaaagacaaacttctcatgttctcacttatttataagagctaaaaattaaaataattgaactcagatagcgtagaaggatggttaccagaggctgggaagggtaatggaggtagcggggaagtgaggatggttattgggtacaacaaaatagaatgaataagacctagtatttgctagcacaacacagtgtctatggtaaaaaatagttgtacattttaaaataactaaaagagcataattggattgtaaaatagagagtagaaggatggttaccagagctgggaagggttagtggggagttggagatggttaatacataccaaaaaaagatagttagaaataatgaataagacatagtatttgacagcacagcagggtgactttagtcaataataatttaattgtacactttaaaatgactaaaagagtataattggattgtttgtaatagaaaggataaatgcctgaggtgatggataccccatttccacaatgtgattattatacattgcatgcctgtttcagaacatctcatatactctgtaaagatctatacctactatgtacccacaaaaattttttttaaaattaataaaaaagacaggtgccaagggtattatataaagcaactgatataaatgcaactattggaataaatacaaactttactaagtattaaaagtttatacacacacacatatgcaccccaaataaggcagacaacacagactctgtacgtgtgtacaatgaaacaatatgacaaatttgaggcccgatataaagatcttatcaatgaatgtaaatgggctgaactcacttataaaaagttcagattagtaacagagcaaaatctaaaactaggctgaatrtaagatacacagatagatacacagacaagggaaggaaggaggaggaggaagaatgagagattgatttagaatggttgaaaataaaggataaacaaagatgcagacaaatgtaatgtgatgcgcagtcttggtatctgagaaaggtatataattcagatcaaaaagagacagaaggagggctttcataatgctaaatactacaattcacaaggaagatgtaacgctttatggaatctcctaataacacagcaacagctttcattaagcagaagttacagggctgcaagtagagatagaaagaactgcactataaaaggaaactttaacatacctctctcaatttaagaaaaatcacgtggaaaaaaattatggaggaaatagaaaatctaaacaacataatcaatgaggtagatcttttagatctgtagtaaactctgaattctgataatggaggatatgcctttttttaagtgctgatgggaacattcaggaaaagttggccatatcttaggcaacaaatgaaacttcaatcataagtcaatttcaaagaacagaaacaatagagaaaaatacaccctgatgtgaaagcaataaaatgagaaatgattaacaaaatacaatcaaaaggcctgctatgtggcatcttaataactattgaataattcttaaactgcagaatttcttgaaaataaaactaaagaaaatcctatatatatataaaatgattgagttattagggtaaaatatatagtacttaatgtttatawcaataaaaatgaaatttaagaaaatcagaaaatcttaaaagctgtgaaatagagcagtcctcaaaaaaaaaggcagaaggaaggactgaattaaaaaagcagaaattaatgctagaatttatagaagttaaatctagaaaatagaaaaacaacagaactaacaaatcccaaatttagccacttgaaaaatgaatcacaaaaataatcagctgttggaggaagggaaaaggcacaaatatacaaaatagaaatgatgaataattaccaaacagaaaattttaagtattataagagaatacttcatacaactctatgcaaatatatttgaagagtcacattggatggataatttctaagaaaattacggtttaccagactaacattaagtcctaaatgacaaattaccttagaagagaataagaaacttaaagtgctccccccacaataatagtcctggctcaaaaagtttagtgatgaaattctacctaacctgtaaaaatcagattaccygtggttcttaaactttactagaacattaaaaaagaggaaattgtcaaaattgatattataaagtacaacattgatctaaaaccttaaaacctattgtactgcagatcattctcactcaatgagtatcagtgtaaaaacttttaagtattagcatgtggaatccaaagcacgtttttaaaatactatatcatgaccaagtggggtttattccagtttgcaagtatgatttttgtatttgtccattctcacattgctaaaaggcactacctcctgagactgggtaatttataaagaaaataggtttaattgactcacagttctgcaggctgtacaggaagcatggctggggaggcctcaggaaacttataatcatggtggaaggcaaagaggaagcaggcatgtcctacatgtctggagcaggaggaagagagtgaaggtgaaggtgaaggtgccacacacttttaaacatcgagatctcatgagaactcactctctattatgagaacagcaagggggaaatcctcccccatgatctaattacctcccaccaggctcctcctccaacattgggaaatacaatttgacattagatttggtagatttgggtgatgacacagacccaaaccatatcatttagcccctggcccctcccatatctcatgtccttctcacatttcaaaacacaatcatgccttcctaacagtcccccaaagtcttaactcatcctcacctccccactacccttcccagctctagtaaccatccttctactgtctatcttacatacaatccaattatactcctttagttatttttaaatgtacaattattttttaccgtagataccctgttgtgctagcaaatactaggtcttattcattctttccattttgttgtacccaataaacatcctcactctcccccactaccctttccagcctctgggttcctctgggttctattctctctgagttccatcattctaatttttagctctcataaataagtgaacatgataagtttgtctttctgtgcctggcttatttcatccacttccatccgtgttgttgcagataaaaggatctcattcttttttatggctgaatagtataccattgtgtatatataccacattttctttatccattcatctgctaatggacacttaggttgcttccaagtcttggctcctgtgaacaacattgcaacaaacatgggagtgcagatatctctttgataggctaatataccttcttttgagtagatacccagcagtgggattgttgaatcatatggtagctctatttttagttttttgaggaacctccaacctgttctccatagtggatgtactaaattacattcccaccaacaatgcatgagttttcccttttctcatcttaaaaaagacaagtcccttccacctatgaacctgtaaaatcaaaaactagttacttccaagatacaatgggggtacaggcattggataaatacacccattccaaaagggataaatcagccaaaacaaagggactacaggccccatgcaagtttgaaacccaccagagcagtcattagctcttaaagctccaaaataatctcccttgactccatgtctcacatcaagcacatgctgatgcaagcagtgggctcccaaggccttggacagctctgcccctttggctctgcagggctcagctcccatggctgctttcatgagctgctgttgagtgcctgtggtttttccaggtgcacagtacaagttattcgtgtatctaccattctggggtctgggggatgatggcccacttctcacagctccactaggcagtgccccagtggggactctgtgggtcggttggggggcctccaaccccacagttcccatctgcactgctgtagtagaagttctccatgagggtcctgcccctgcagcagacttctgcctggacatccaggcgtttccatacatcctctgaaatgtaggctgacgttcccaagcctcaactcttacactgtgcacctgcaggcttaacaccacatggaagccaccaaggcttagggcttgtactcttctgaagcaatggcccaagctataccttggctcattttagccatggctggagttggaacagccacaatgaagggtgccatgtctggaggcggcacagagcagcagggccccgggccttgcccacaaaactattcttccctcctaggcctccaggcttgtgataggaggggctgctgcaagggtctctgaaatgccttggaggcattttccttattgtctttactaacattcagctcctcttatgcaaatttctgcagcctcccagaaagtagatttttcttttctaccacatggtcaggctgcaaattttgcaaacttttacactctgcttcccctttaaatataaattccagtttcagatcatctctactcactcatatgaccgcacattgttagaagcagctgggccaaaccttgaatgctttgctgcttagaaatccttccaccatataccctaaatcatgactctcaagttgaaagttccacagatccccagagcaggggcacaatgctgtcagtctctgctaaagcatagcaagagtgactttactccagttcccagtaagtttccatctccatctgagaccaccttagcctggacttcaacaatttaaccagtctctaagaagctccaaactttccctcatcttcctgtcttcttctgagccctccaaactgttccaacttctgcccactacccagttccaaagttgcttctacattttcaggtatctttatagcaatgcccctctcccagtaccacttttctgtattagtcctttctcacactgctataaagaactatctgaaactgggtaatttacaaagttaagaggcctcagaaaacttatagtcatggcagaagttgaagggcgagcaggaggaagagagtgaaggtgaaggtgccacacattttcaaacaatctgatctcctgataactcactcactattactagaacagcaagggcaaaatctgcctccatgatccaatcacctcccaccaggctcttcctccaacacaggggatcacccctcccaaagttaacttacaaatttaacattatgcatataaaaataccatcagactgtttttccctggcatccacaagttaattgtaaaatttatttggaaagccaattaaaaaaaaatctgggaatatcctgcaaaagaatagtaaaaagaacctagccccatagacatttaaacatactgtaaaaactctttaattaaaattccagagtatattggtatcccaatggaaatgagcagaaaatctgtatggaaatttagtgtatgataaaagcagttcaaatcagtggagaaaagatgaacttcagctttttaataaatggaatttccataagtgtattagattttttaatgataaaattggattcactcctcacaccataataaattccagaaggatgagggatttaaatgtaaacaaacgaaaccatataagtactagaagaaaacaaaggtcaactctggtataacctgtaaatgggagaacccttcctaaaaatgagcagtagacaaaatatctcccctgagagatgttcacattctaatccctagaacctgtcaatatgctacgttacatggcaaaagggactttgcagatttaactaagattacagagaaattattctgtattatccaggtgggcccaatctaattaaatgatccagagaactttctttggctaggtaagatgtggtagaaaaggaggtcttgcagcaacatggatagaactggaggccattatattaagtgaaacaagtcaaacacagaaagacaaatattgcatgttctcacttataagtgggagctaaataatggctagtttcagatatgttgaaatttccataataaataatgtatgtttaatcacaagcttccataagtacccttatacatatcttcatgctcattctattgatgttttttacaggatgtacttcaataggtaggctttctaggccaaagagtatgaatatttttatttttattcttattaatactgccaaattgcccttttaaaagtacaactaacccttgaacaaggtgggggtttaggggcacccccatgaagtagaaaatacatgtataacttctgactttaccaaagcttaactactagtagccaactgttgattggaagcattaccaatagcataagcaatcaattaacatatgttttatgttatattatatactatcttcttacaatagagtaagctagaaaaaaagaaaattttattataaaaatcataaggaagggaaaatacatttaccattaaatgaaagtgaattatcataaaggtcttcatccgtgttgtctttgtgttgagtaggctgagaaggaggaagaggaggggtgggtattgctgtcttggggtggcagaggcagaatacatgaaggaggttgaaggagaggcaagagagaggtaggcatacttggtgtaactttatggaaatacatcataatttgtttatttctttttcatttctctaacaatgtttctgtattgtaccaatccttcttccattgtttgctttagtttcagtgcttgtttcatagaagggtctgtgtcagaagtagtcaaaagcagtcktgaacagtcagaacccttctgccagattgtctgtcaatttgttttctggcactggttcttctatgtcttcttcctcatggtctgactactcatagtcggaggcactcatgtcttccttactaataaatgtcctttgtggcatttttttccccaagagtcaagcacttttgtctacattaaacacctcaggtagatatcctttcttctcaatgattttcttaatggtggctgagaacttgtctgctgcttcttggtcagcagaagctgcttctcttgttatcttgatatttttaaagccaaacacctgtctaaaattatcagaccatcctttgctggcattaaattctccagctttagatccttcaccttccttttgctttaagttgtcatataatgacttcacattttctcaaatcattatagtctatggatatgtctttctcataggaatcctgtacccacatgaaagctgtattttcaaaacaagataaaagggtattttgcaaaaagtgcaagattttagcacctgctggcatagcttcagtgacagcttcatgaatttccttttccttttttagaatggtcctcatgctggattcatttatcttgaaatggtgagcaaccacagctgcagatccccagtccattgtacatatcaagcaattcaacattattcaacattttcttgtaacgtcaggacttttctctgcttcttggcagaaattccagcatcactagtggcacttcacagggaactgatagtgttattcaaggtttctggtattgcactaaatataatgaaaaatacacaagaatcacaaaagatcactttttactatgatacacaatttacttaagagacaaactgctcatgcatagatgattagcatcatgcagcattttaagcagatactcaaaaacctcaaatccaccacagtagcaacaggaggtggctatacaattattacagtagtacattatgtgtactacagttaatttgatgctattatgacttaatgttcaatctttatatttgttaacatttcttttgattgaatggttccatgtatggtctataagtgtgtgtatacattttgataaattttaactttttataacagattgtatttatcttagactagtatctacatgtttttttgaattcatgaaatatccttttcttaatttttttggatatttttagcctacgtggttcatctgtgagttttttcaaattgtcacaaacctccaaaaacttttttttaatatatttgttgaaaaaatctatgtctgtcctggcatggtggctcacgcctataaccctttgggaggctgaggcaggaggatcacttaagcccaggagtttgaggctgcagtgatctgtgatcactgcactccagcctggatgccagaatgagaccctgtctcaaaaaaaaatccatgtataagtggacccatgcagttcaaacccatgttgtcaagggtaaactgtattgatttaccaataatatgtaagatgcccacttctaaatgccacttccaacaatctgagagattacgtgacctgcttaagatcacatggcagagtctagaataaatctcataattatcagtaattattgttgcctgactcagtacagtttatttgaacagtttgtaaatttgcgtatatgaaacactgaataaaaaggctcatcagcctttgactcctctaccaattataaaaatgtcatcttggttttgagtcaataaaaatttaaagaataagtgcaaaataagttaaatattaactctaaaagaaaaaatttctgaaatgtaaagattaagtcatttaatcaagactagtcacttgtttatatatttcctagccctatatttaactataaaattaccatacatttttgagaaaatatattttaaaaaaacagtaataactagtatcctaccagtacattttagatgtaaaaaaccatctgattactactgaaatacaataaacagattttgtgattcctgatattgattttattttctacttgcaacaagcaatgaaaactgaaatctgatcttgtttaagaaagtttcttttcctatcaagttatgctggaataaactggttcaaatatctactttttcctgtgatatgctttgataatatatagacactgaaactcaatgtatcaatcaatacatagtaatgataactgaaaatgaaatttttagaaaatactttaatctcaatacctttacatctccccaaagaatgactacttatttccatataggcacatcaactcatatcaaagatttctaagatgagaagggaaaactcaatgttaaagacaaacttttgtacataaatataacacatthtaattgcatatttttcctgttttgcttacttatttttctaatgaaaagaactgtcaacaatatatatgtgggtatttcttacacaggaaggcataacttccatagagatcacatcaacactttgaagtaactaagaccaacagtatgggacttcataacatttaccctaaaagataagttgcctgttatcacccttttgggtcaaggtaacactatttttttttctttctttcttttgataagctgctgacacttattgaacatcctaacacttcctccatcatcatcttagtctcttgccttcttctagttctaaaaaaatggaaaaatattattttctttaagagcagcatggaaaatactgtatttggaaggacaacaaagtgtgaactaagtgaacttgaaggtagaaaaaataatatcaaaacatttttaaaggtttgtaataattccataatttatagggatatttaaaaatgaaagtatgtggttttctcaagctattagtatatcacagatttagaaatcactaccagaaggttttctttcttttcaatctaatggtcttaccagtaagtagaagtcattaaataaatcagcaagctcatgttatcaaggatcatgaccagtatcattcttccattaactcaaaatttcgcaaaaagccaccttcacgtacatataaacttttttccttatgaataaacctgggttgtaaaagttacatatgactgctctattttgataaaattaattttacccaacaatgcaaatttttaatgtttacttttttaaaaaaaatcacttagcttatatataaaatatcaaattactagcctaggcaacatagttagaccccatatctacaaaagtaatttaaaaattagccaggcatggtggttcgtgcttgtacttccaactacccaggaggctgagctagggaggattgcttaaacctagcagttagaggttgcagtgagctgtgatcatgccactgcactccagcctggaaaacacagcaaggccttgtttctaaataaataaataatgtcatatgaacagataaaggcataaaatgcaaatgttcagttacttttaaacatttttgttaacatatgttggtttgctctcttgatctattttccacaacttctaattatttatataagaaacttggctgtaattctagtagaatataaaatgcaactgagttcaatagagattcattcatatgtaactatcttctaaagacaaagctttttttggaaaaaaataaaaaacacctaaaatgtaaagcttattaaaggattatgtttgggggttccgtaaattgtttccaagatcagtatggaaaattcttgtaaacagttcagttcttactcagcctgtgtccttttaacttaaaaggctttgtagtataattgctgtgtaaatatcagaattttccatatattgtgcaatgtacataaagaagtcaccaaatggcttatcttgtacttatcaactagtttatttttatgcctccaaaaagctgtatttttttacaagagcagctgctactttgtaaatattttaatggtttctgttaagtagagctgtcagtttaacaaacaatattataaaagattttcattcttccatgtgattgaacatcttgaaaagtgttttaccttgaaaatcctttggagattttagactggaaaggatatctcctttgaaggcacaaagccaacaaaagaatagataggtttaaaaaataatgtataagatcaccagagaaacagtgccatttatttcagaagacaaatgtataacagcaataagttctcttagctcacttctcttcttttgacttcagcagtttgttgaaatggaagagcactggctttgtgccagacatttcaggtatgaaccttgattcttctgccacttaatagatattggtttagagcaagccaattaacctctttgaccctcagtttctgtatctgcaaatggggtaatgatacctaccttaaagggtcattatgagaattagagataatatatgcaaatgggctaactgaataaaggtggcaattattattctatcctacctacctagcaaccaggagtctcccaatcattctttagtctttgtcctttacattttttttcacccagcttatctcttctttcttttttgtctacttcatggaattgaaagtaagaaatattttagagatgatctaatttagcacttttgttgaacaaatgaggaaatagaagctcagagagattaaatgacttgtctaagatcacagatagttaaacacagagatcagaaccctggtctcctgagtttttcactgttttcattcttgctgtgaaatggaatttgataaggtaattctagcctggatctaaaggaacatgttaagataggatagcaaaaaaacagtgaaagagacaagaaaaggaaaaaatttaaaggggggtaaggagagcttttccttttgttctgcatcaaggctgagcaaattttttaaagggccagatagtaactagtttaggcttctcaagtcatatggcctctatctcaactactcaactccgacactatagtacaaaagcagccttagacaatatgtaaacaaacaagcawggctatgctccaataaaactttatttggacactgaaatttgaatttcatataattttcacatctaaaaatatatctttcttgtattttttcaaccatttgaaaatataaaaaccattcttagattgtgggccataaaaaaaacagatgtagggctgcatttggcccatgtgatctatagtttgatgcctttagaagtataagcctgataagtagaacagatattcagccttgatgtcatagaaataatagagtttaatggggactgggatgaagtggagtgtgcctgccccactaaagtgggcagtagccattctgattaaggagactgtggctcttaggaattggaggccaaatactgcaaaatctgagttttcaaaaagcctgaacactggatttttatgctaaatccctccatttttttatgaattagggtagcttccattgcacaaaacagaatgaaaggtcacctaaatgtcccaattttttcttttttttcttttgagatggagtctggctctgtcacccaggctggagtgcagtggtgcaatctcagctcactgcaagctccgcctcccgggttcacgccattctcctgcctcagcctcccaagtagctgggactacaggggcccgccaccacgcctggctaatatttgtaatttttagtagacacagggtttcaccgtgttatccaggacggtctcgatctcctgaccttgtgatccgcctgcctcagcctcccaaagtgctgggattacaggcgtgagccaccatgcccagccctaaatgtcccaatttttaagtgttggtaaataattcaaaatagttgttaaatactgtagatcaaacatctataaactgaatttggcacatggactcccagtctaaaatctgtgttctaggaagacaaagcaaaattctaggtaattcatgcttccgagcaataattcaaatttacccaattcaggatctttcagaccaaacacttaacctttccataaactgaacacaaaggtgattataaagtaataggtcattcaggctataatcactccctatcccatcctgtaccccacccccaccaaaattctgcttctttgtagttcattagtttaagacattaagctttgtttagtaggtggtaccaaagtactagtcacatctagaacctttcctggaattgagtacactcagtattatatttcaaaaatataatcacatattatagctgtaatctaagactatcagatttaaaatagttaatataaattttttttctaactcttggtgtcctttctaaaagttataaccatattaagttgctgccactatggatcttactttcattttatattgaggaaaacacaatttaaacatatttacaaatataaaggacccaaaatatgtcctttagcatcttctaaaaacttttctcctctactttttttttttttttttttgagacaaggtctcaccctgtcacccaggctggagtgcagtggcatgatcacggctcactgcagccctcaacctccccaggtcaggtgctcctcccattcagcctcccaagtagctgggagtacatgtgtctgccaccatgcttggctagtttttgtatttcttttttttaagagatggggttttgccatgttgcccaagctggtcttgaactgcttggctcaagcaatccgcccgcctcagcctcccaaactgctgggattatgggcgtgagccacagcacccggcctcttctctacttctatgttgtcactatttgtttatttttttctgccccctctccccaccctgttatcacactgtaagctcattaaggatgggattatgtctgcttcatctttatatcccccaatcagtaaagatatctgcacaaaatagaccttcaataaatgtttgcttttaagaatgaacaatgaaacctaattttcacatttgaaaatgaaaccatctaagaactccatttactggtagagatacattttcattttatcttactgaatagcaaagagtacaattgatccatgtagtgatattctggaaaataagtatgttaatagaaggacctactacacttttcatccttaaaatagtactagcatatccaagcagaatgtattacagaaagttttgggaggagacagtccatatgctatatgtatcttctaatggaatataaaaagaaattcaataacagtaaggattgggaaaaggactcaaggtgagaataagtacaatgttttgtctgtcaaggaaaaagcatttagtcctcacctgctgcagttttcaaatatatatatctatgtagatctatatacacactgtggaaataatatacataagtgacattagcaagatggcagattaggaagctccaggccctcatttttctatggagacaaatcacctgtaacatatacataaaaatagctttgtgataaatctagaaattagttaatggactacaggactcaggcaagtgcaaaaacaagagaatggatggtgcctgagagggtaagagagttcattgcattttgcttgcctgacmcctcccttggaacagaagaaatagagtgaaacttaagtccagcatgctaacttgtttgtgggttgcagtgctttgctcagggaactgatgagaatgacagtttgcatagtttgggtacaagattagaggccactgaaaacagaggttaatgccttagcatgttagacaggagagactctgcggttctgcaggcaggctctagggggagcaagagattaagggcagaggactacaacagaaacggctcccgcgaagacacaggaaagaagacagtcagaagcacccagatacactaaaagtaaacatacaaccccaaagaaaacgcatccccaggaaaaatctgagaggtcttagaacctctagccagcctgactggtcacagttttcccctaagtaaaagtagttcataaagattgagaaaggtggctgtttcttcaaatgctcaaatcccaacaaaagacgacaaggcatacaaagaaacgggaccatggcctgaccaaaggaacaaaattaagctccagaaatttgccttraagaaatgcagatctgtaagcttcctaaaaaagaatttataataactctcataaagatgatcaagacctacaagagaacacagaactgcacagaaatcaggaagacaatgcatgaacaaaataagaatatcaacaaagagaaactattttcaaaaaattataaagccaggcatgatggctcaagcctctgatcctagcactttgggaggctgagaagggaggattgcttgagctcaggagttcaagactagcctgggcaacatagcaagaccctgtctcttgaaaaaaaaacaaaaataaactgtggacctgaaaaatataagtgaactaaataattcactagaggggttcaatggcagacttaagcaagcagaagaatcagtgttcttgaagttagcacatttggaattattgagactgaggagaaaaaagaaaaaaaatgaagataaattaacagaacctgagcagaataatatatgtagtataggagtctcaaaaggaggaaagaaagagaaagggacaaagagcttatttgaacaaacagtggctacagacttcccaaggctgataaaagaaatggacctacaaactcaaaactcaatgaactccaactatgataaacctgaagagacccataccaagacacattataatcaaactgttatgagtcaaaggaagaatcttgaaaccagccagagaaaaacaactcatcacgtacaagtgagccaactaaggttatcagcagatttctcaatagaaaccttgaaggctaaaaagaaatgggatgattaaagtgctaaaagaaaaaaaaatcaactaagaatactgtatccagcaaaactgtccttcagaaatgaagaagaaatgaagacctttccagataaacaaaagctgtttagtcaatgttactagacaataaatactaaggagagttcctcaaattaaacaaaggatggtaggcaccaacatagtaatatgaaattataaagttctccactaatgataaacatttaaataaatatagaatcctatattgtaattctagtgcataaatccacttttaattcttgtatatacaagtctaaatgagtaaatcacagacacacacaattataaatctatgttaattggtacacaatatatataacaggtaatttatgacaataacataaggggggaaatggcagctgtaaaggagaatttgtgtatgcaattgaaattaagttattagcctaaaatagatttgttataactttaagatactttctgcaattgcagtggtaaccacaaaatatccatacaatgcacacaaaaggacaaagaagggagtcaaagacagacagtaacagaagaatgagggtccaaaaagccacaagatatacaggaaacaggtaacaaaatggcaacagaaaatccttccatatcggtaattactttaaagtgaggcaattaaacccctcagccaaaagacatattggctaaatggataaaaaaaataaaaataggatccagtgatatgctgcatagaagcactttagatctaacaccacataaaggctgaacttgaaggatgaaaaaagatatgctatgcagacaataaccaaaagacagcagggatatctatactaatatgaggcagaatagactttaagtcaaaaactgtcacaagagactaagaaggatactatataatgattaaagggtcaattcaccaggatgatatagtaattataaatatttatgcactaaatatcagagctcttaaatatgtgaagcaaacattgacagaattgaagggataaatacatatcaacacagtaatagtaggagatttcaatagcccactttcaataatggataggaccaccagatataagataagatcaataaagaaataaaggacttctcttttttttcccccaaggcggcagatcagagactcttttagcatgcttcacctatttggaagcaaaaaaaaaaaaaaacacacacacacacaaaacagtgcacagtcatatagtgctcttttattcaagaaggagcacagaaattcaaatcctggaaaataaaaggtgagaaggcaccctgagtagcagcatctggctgagaactgtgagtgaagtccccgatatggtagaggagcaaattgtgtacctctgtgatctacctttcctctgagaaaccatgccacccaggccatgggaaactacctcggcccttctaagccctggggctaacatggcgagaggccaggagactgagaaagaaaaatgctgggaaatgctccagtatttttctcagacctgggatctaacaggaggatgctcttctcaatcttggctcacaacaaactgggcaggattcagtaacctggcaacagtagccatgggcattagagattcttgggctggagaatggagtgctgggactggaggtggggaagggcccccacatccagaactgagtggtggttgtggagtgcattcaagccatgggttctgaaattgggctttccccctttgtggaaccagagagggaggagatttgctagagagccatggttttccccaagtggcaagatttgtggacagggatggcactgtgatctaaagccagtctgcactgactttcctgagtgccccagctcatgccagggtgggattcaactccattggttctaaggagtgagagggaggcagattcccacaccagctcacctggtctaggagctttggctgccctggtcttcacatgtgaggaacctggtgcagcagcagtgtttctaccctttactgggcatatctccaggcatttggtgactgctccctaaactctcctcagagatagtggttgcattcactgtttgggaggtgggggggccgggaggtgggagcagcgaaagtgcagggttgcctggtccagctctgcccagcttcacacactctctcaggctgaggataaaacccaaaccactgagcattccataatccagcccattgcctgggacactggagagtttctcttggtaaacaaagatcaagcatgaattttactactaccaccacagccagctcttacttacaagtgccactgactggcctggaggtcaacctgcacaatacaggacaaaatctggtaacacaagcccatagcacttatgaatgagatgagctccttgtgacctataaccctggcttcacaggaggtcatgcgcctgctcacctgcctggtataccgctactacaaacagcatttgaaaaagccaccacatgatggtaatttacaaccaaggaattcatacatagtctttgccactgaatgcacccagaagcaaagccaaacagccctgcacaacatatattacagtcacatcctcaaggatttgggggtgggggagagggggggaagtcctgtccaaacccaagtaaattcaataataagaagtgactatttctccaaatgagaaaaaatctgcataatactggaagcatgaaaagtcaagtcagggagttatgacacccctcaaaggattacactaactctctagcaatggatgctgaccaaaaggaaatttctgaaatgccagataaagaattcaaaatattgattttatagaagctcaatcagatccaaaagaaatccaaaaaccaatagaaagaaatcagaaaattaattctggatatgaatgagaaatttatcacggagaacttcaccagttttttcttatctaaaaatgaacaaacataacttttggaaatgaaaaattcactgaaggaattacaaaatatggctgaaagggtcaataactgactagataaagcagaagacaaaatctcaaaatttgaagaaaatcctttgaattaatctagttagacaaagaaaaaagaataaaatagaatgaatattttgagaagcatgggattatataaagaatctaaacttacgaatcattggtgttcctgagggggaagaaaaaacaaagttttgaaaatcatttaaggaaataatagatgaaaatttccctaattttataagagatttagacatgcaaatacaagaggccaaatgaatactaggagaacacactgccaggtggatttcaccacaacgtatagtcattaaattgtctaaaattaatataaaggaagaaatcctaaaatcagcaagagaaaatcatctagtcacttgtaaaggaagctccatcagactaacggtggacttctcagtgggaactttataagccagtaaaagattgggattctattttcaatgtgcttaaaggaaaaaaaaattgtcaaccacagattttgtattctgctaaaataagtttcataaataaaggagaaataaggtacttcccaaacactgatggaatttatcaccactagacgaaccctataaaaatattcaaaggagttctaaacatggaacaaaatggtcaatgtttgccatcataaaaaatacacaaaactataaaactcacaggtcttataaaaacagttagttacacaaaggaggaagagaaagaaatcaaattacaacaggacagaactccaccaaacaacaaagacaaacagaaagagggaaaaaaagatgcaaataatgtacaaagcaatttgataacaattaacattatgatagaaacaaacctcacatataactatgaacattgtacataagtagataaaatgcttaatttaaaaggtatagattggcagatgggttttttaaaatatgaaccatattttcataagaactataagaaactccccatattggtaaagattcttatagcctgaaggtaaaggactagaaacagatctcctgcacaaacagaaactaaaagtgagcaggagtatctacgcttatatcagataaaacagacttttaatcaacaaaagtaaaaaaaagacaaagtcagtcattatataatgtaaagggatcaattctacaaaaggacataaaaatcctgaatatatacacaccaaacactggagcagtcagagtcacaaaacaaatattactggacataaagagatagacagcaatataataatggtgggagacttcaacactgtacctgtagcagttcacagatcattgagacagaaaaacaaggaaacactgggcttaaattgatcttgagaccaaatgtacctgacagacatttacagaacactctacccaacaacagcggaatatagattcttctcatcagtgcatgcagcattctcaaacacagaccatatattaggtcacaaaacaaatctcaataaatttttaaaaattgaaatcataccaagtattttctcagaccacagaaaaataaaactataaatcaataccaggaggaactgttgaaactatacaaatacatggaaattggataacatatccctgaatggtctttaggtcaaagacaaaattaagatggaaacttaaaaatttttagaaatgaatgaaaatgaaaacaacataccaaaacctctgggatacagcaaaagcagtgctaagagggaagtttatagcattaaatgcttacagccaaagaacagaaaaatcaaattaacaacctaacatcacacctcaaggaactagaaaaaaaagaacaaagaaaactcaaagctaacagaaaacaaataacaaatcagggaagaagtaaatgaaattgtgaacaaaagaacattataaagggtcaaagaaacagaaagttggttcgttgataaaataaagttgacaaactgctagctagactaatcaagaaaagaagacagaagatccaataaacaatcagaaatttaaaaggagacattagaactgataccacaatacaagtgatcatcaaagactaccatgaacacctctacactcacaaactagaaaatctagaagacatataaattcctggaaacataaaaccacccgagattgaacacatagaaatcctaagcagaccaataacaagtagtgacacttaatcagtaacaaaaaagtctcctaaggaaaaaaaaaaaaaaaaaaagtccagggccaaatggattcacagccaaattctaccaaatctacaaagaactggtaccaatgccctctgaaatgcttccaaaacttcaatgagaagggaagcctccctgactcattctacagagccagtattattctgatactaaagccggactagcacacaacaaaaaatgaaaactatagaccaaaatctctgatgaacatagatgcaaaaatctgcagcaaagtactagcaaacccaatacaacagcacatcaaaaacataatacatcacaatcaaatggttttattccaaagatgcaagtatagttcaacatactcaagtaaacaaatttgattcattacataaggagaattaaaaacaaactatataaatatctcaatagatacagaaaaagcatttgataaaattaaggatccttttgtgataaaatcctcaacaaactaggcatagagggaacatactgcaaaataataaaagcaatatatgataagaccacagaaaacattatactaaacagggaaaatttgaaagcagtctcccgaagaactggaacaagacaatgatgaccactttcaccactcctattcaacatactagaagcccaagccagagcaatcaggcaagagaagaaataaaaggcatccaaatttggaaaagatgaagtcaacttatctctgtttgctcatgatatgatcttatacctagaaaatcccaaagactcccagatttcataagttcagtaaagtttcagaatatgaaattggtgtacaaaaatcagtgtcatttctatacatcaacaacaaactgagaaccaaatcaagaactacaatagctacaaaaaaagtaaaatatttaggaatatattttaaacaagggggtgaaagatctttacaaggaaaactacaaaacactgatgatagaaatcatacatgacacaaatggaaaaacctcccatgttcatggatcacaaaaatcaatatcattaaaaaaaaaccatacagatgtatagattgaatgtaattcctatttttaaaatgtaatttttcatagaattagaaaaaacaatcctaaaattcatatagaatgaaaaaagagcctgaatatccaaagcaattgtaagcaaaaagaacaaagctggaggcatcacattacctgacttcaaattatactatgaggttacagtaaccaaaacagcatggtacttgtataaaaatagacatacagatcaatgtaacagaatagagaactcagaaataaagccatatacctacagacaactgatctttgacaatgtcaacacaaacataccctgaggaaaggacatcctttacaataagtggtgctaggaaaattggattacctgtgcagaagaatgaaactggacttctgtctctcaccatctacaagccaactcaagatcaattaaaagcttaaatgtaagacctgaaactataaaaatactagaagaaaacctacggaaaactcctctggacattggcctagatgagcaatttatgactaaggcctcgaaagcaaatgcaacaaaaacacaaatagacaaatgggacttaattcaactaaagagcttctgcaaagcgaaaagaaataagagaacagacaatgtgtagaatgggagaaaacatttacaaactatgcatacaacaagggactaatatacaaggaactcaaacaactcaacaacaacaaaaacaaataaaagaacataaatattttctcatcctttacccacctcctacactactgaatgggcaaagaacatgaatattttttcaaaagaaaacatacaaatgtctaacctgcatatgaaaaaatttttaacatcactcacaatcagagaaatgcaaattaaaaccacaatgacatatttcacgcaagtcataatggctaatactaaaaattcaaaaaataacatgttggtaaggatgcagagaaaatggaacacttacacactgttagtgggaatgtaaattagtataacctgtatggaaaaccrtatggagatttctcatagaactgcaaatagaactgccattctaggcagcaatcccactactggctatctacccaaaggaaaaataattagatctaaaagatacccacactcatatgtttatcactgcactattcacaataccaaagagatggaatcacctacgtttacatcagtgaaggactagatacagaaaatgtagtatatatgtgcaatggaatactactcagccatataaaagaataaaatcatcttttgcagcaacattgatggaactggaggctataatcttaagtgaaataactcagaaacagaaagtcaaacaccacatgttctcacaagtgagagctaaataatgtgtacatatggacataaagtatggaataatggacactggagattcagtagtgtaggaggtgggtaaaggatgagaaataaattaatgggtactatgtatattattcaggtggtggttacactaaatggccagactttaccactacacagtatatccatgtaacaaaactgcacttgtaccccttaaatgcataccaaaaaaaagtaatagaggtcttcaacaacacagttaccaccctcccactgttctgaggctccagtgtctattattgtacactctatttccatgtgttcacagtatttagctcctatttataaatgagaacatatggtatttgactttctgttttctgagttatttcacttaagataatgacctccaggtctatataaagaacagaacatatacagaacactcacccatcaactgcaaaaaaaacacattattttcaagtgcacatggaacattctccaaaacagaccacatgaaggccacaaaacaaatcttaacaaattttaaaagacagcaatcacagaaaatatcttctctgattacagtgaaatgacactacacatcaacaacagaaggaaaactggaaaatccacaaatacatgaaaattaagcaatgcactcttaaacaacaggtcaaagaagaaatcacaaggaaaattagaaagcctcttgagacaaatgaaaatgaaaaaaatgttcctgtgttaggccattcttggattgctataaaggaatactccagactgggtaattcataaagaaaagaagttttattgatagttctgcaggctctacaagcacagtgctggcatctactcagcttctgaggaggccttagggagcttttcctcatggcagaaggtgaaatgggaagagcaagggaaggctggagaaggagaaagagaagggggaggtgccacacacttttaaacagccagatctcatgagaactcactattgcaaagacagcaccaaggggatggtgctaaaccatttatgagaaatctgcccccataatccagtcaccttccatttcaccttcctccatgaggaaaagttccctgagtcctccccagaagctgagcagatgccagcatcatgcatgtatagcctgcagaacaatgagtcaattaaaccccttttctttataaattacccagtctctgatatttcttttttttttttccccccgagacagggtctcactctgtcacccaggctggagtgcagtggtgcagtctcagctcactgcaacctccatttccctggtcaagcgattctccagcctcaaattcctgagtaactgcaactacaggcatgagctaccacgcctaggtaatttttgtactttttgtagaaatggggttttgacatgttgctcaggttgtatggtatttctttatagtgatgcaagaacagcctaatacaaggtcccacctccaacactggggattacatctcaacatgagatttggagggaacatccaagccatatcagtgcccaaacttgtgagacgcagtgaaaacagtactaacagagaagtttatggctatgtttacattaaaaaagaagaaagattgaaaattaataacctaactttgtaccttaagaaactgaaaagaaagaaaaacaaactaaacccaaagctaacagaagaaaataataaagtttagagcaaagatcaatgaaatacagaatacaaaagcaatagaaaaaaatcaacaaaacttaagaggtggtttttctaaaatatctacaaaactgaccaattattaggtatactaattaaaaaaaagagagaagactcaaataactaaaatcaaaagtgaaagaggggatattacagccaatacgacataaaataaagagggttgtaagagaatattacaaacagtcatatgccaacaaactggaaaacttacataaatggacaaaatcttttaaacacacaactaaccaagattggataatgaagaattacataatctggacagacttacaactattaaagagattgcatcagtaaccaatactccacacaaagaaaagcccaagacctcatgccttcattagaatattccagcaaatatttaaagaattagcacccattctcctcaaactcttccaaaaaaattaaaagaagggaaaatcccaaattcattatataaggccagcattaccctagtaacaaagccagatgaagacaaagaaaactacagaccaacgttcttgatagatattggagcaaaagtcattaacaaaataccagccaacgaaattcttaggcatagtaaaaagataatacaycatgatcaagtaaaatttactgatgtaaagtaaggatggttcaacataagaaaatcattctaatcacattaacagaatgaaagatgagaactacataatcatctcaattgatacacacacaaaaaagcatttgacaaaatttgatgttctttcatgctaaaaatgttcaacaaactaggatgtaaggaaactattaatactccaacataataaaggctatacatgaaaagaccacaggtaacatcagtctcaatggtgaaaaactgaaagccctttctctaggatcaggaacaagacaaagatgcctgctttcaccccttctatttaacataatactggaatgtcctagtcaaagcaattatgcaagtgaaataaaaggcaccaaaatcagaaaggaagtaaaattgtctctggttatagatatcttaatttcctatgcagcaagccctaaagatcccatttaaactttagaataattgaattcagcaaagttgcaagatacaagtcaacatacaaaaattcattgcatttctgacactaaaaatgagcaatctgcaaaggacagcaagaaaacaatttcatttacaatagcatcaaaaagaataaaatactttggaataaacctaaccaaggaggtaaaagacttaaaactagaaaacactgctgataggtattaaagacacaaataaattgaaagacatccaatattcatggattggaatacttcatgttgttaaaatgtcagtattgcccaaggtaatctaccaattcagtgcaatccctatcaaaatcccaatggcatctttggaaatatagaaaaatccatttaaaaattcatatggaatcacaagagatgctgaatagccagaacaatcttcaaaagggaaaaagaggtctttctgattcaaaacatattacaaggctacagtaatctaaacattagtactggcataaacacagacatatagaccaacaaaaatgaacagaattgagagcccagatataaaccattaaccatatggtcaaacaatttttgacagatgtcaacaccattcaatgcaaaaggaactatctcttcaacaaacgttgctgggaaactggatatccccatgcaaaagagcaagttggacccttttgttacaccacaaacaaaaattaactcaaaatgaattaaagacctaaacataagaaacaaaagtataaaactgctagaagaaaacattagagaaaagcttcatgatattggatatgacaatgatttcttgtatgtgacaccaaaagcataggcaacaaaagcaaaatagacaaatgggactacaaatggggcttaatccaacttaaaaacttttatgcattaaaggacacaataaagtaccaataaagtgaacagacagcctaaggaatgggagaaaatatttgcaaatctgacaaagcattaatatctagactacatacagagctcctacaacttaaaaacaaaaacaacctaattaaaaatgggcaagggggctgggtgccatggctcatgcctgtaatgccagcactttgggaggcaggattacaggcatgagccaccacaggaagtgggaagattgcttgaccccaggagttcaagaccagcctgggcaacctagtgaaagcccctctctacaataatgttttttttaaatgagtcatgcattgtggtacacacctgtagtcccagctactcaagagggctgaggtgggaggatcacttgagcctgagaggtcaagactttagtgagccatgattgtgatactgcactccagcctgggcaacagagtgagactctgtctcaaagaaaaaaaggacaagtgacttgaatccacatttcttcagtgaaggtatacaaatgaccaacaagcatataaaaagatgctcagtatcacttattagagaaatgcaaatcaaaaccataaggtagcatgtcacattcattaggatgactagttttaaaaaaacagaaaataacaagtttgtcaaggatttggagaaattagaatctttgtgcactgttggtaggattgtaaaatggtgaaccacaatgaaaacagtatggcatttcctcaaaaatttaaagatagatccactgtatgataggcaatcccccttctgagtatatgtccaaaagcactgatagcagggtctcggagatatctgcacatccatgttcatagcagcattattcacaatagccaagaggtggaagcaacccaaatgtcaatagatagagaatggaaaaacaaagcatggtatatacatacaacagcttactattcagtcttaaaaaggaagaaatcttgtcacatactacaacacggataaaccttgaggacattatgctaagtgaaataagccagtgacaaaaacgtgaatactgtatgataccacttatacaagatctaaagttatcaaattcatagaaacagaaaataacacgttggttatcaaactgggagaggggcaaatggggaattgtacaatgggtgcagtttcagttttgcaagacaaaaaagttctggagatttgcttcacaacaatgtgaatacacttaacactattgaactgtatgctttaaaatgtttaagatggtaaaaaatatgttttgccatacacggtggtcctaagaggttttttttttggtttttaataaggtttatgtttcttacaaaaaatatatttttcacagcttcattatgtttcaaacaacatttttaaacaatgccctgtcaaagttgccaatatctctctatacacctctgtacatctctaagatatgggagtatatatctccctataaagtttaaaatgctaattgaaagcaaatattgggaaagatattttccttttcttttcaagttatgtgctatatgtgaaagagtaaaatcacttcctgcaatattccaagataaaatattccagtaattggctaacaaaaacaaaaaaattttataaataatatgctcgttaaaaacactacacataagcaagatataaatgaattttttaaaatctatacttgaaaacattcactattctgttatcaaactgctgaagtaagtataagaatgacagaagtcatagggaactaggacaacaagattttgaaattgacaaagaaaaaagttccactgggatatgtgaatgttgttctgtaatcttacttataagggagttagcagaaattgtacttagtatttcactcacatattaatcattttyaacagaactcctgggacccttggacagaggggatatgctaaatgaagcatttattggcctgtctttagcacctcaaggagaagactcatttccagataacctccctccctcttgcccaacccacagacatattttacaacaaagaatactgartggctcttctaacaggtaagaaatgttgaactgaggaaattgctccataaagtatttagtattacctgttcaaatgcgaactaatagcaaagcaagaatatttcaaaatgtcaaggagaaaaatttgcatttctcatggctcagactttgcagtagtttggttatttggagcaggcataatgaatggcagaagtgaatgtaaaaataatattgctacaataaatgttactctgggccaaaatgaaattactataacatattgaattgtttgtattctgctgttaaattctaggattgttaggctacctttaataaatattaatttttagaatatgtagtttgaattataatttatataatatttatttaatgcaagtttaccattagtttttgaaatctgataaatgatagtttaaatatctgatatctgtccagtttgctacatggggttattgagaagataaagaataaatatgaaatttaaaaaacaaacaaaagtaataatgttatttaaagtgataattataatattaattatgataatgattctctcaagcaagggtcagcaagctttttgtgtaaagggctaaagagcaaatattttaggctttgcagcccagacaaacttttgcaactactcaatcctgctgttacagtaaaaaagtggccacagacaatatataaatgaatgagaatggcagtgttacaataaaacttcataaaaataggcagtgggtcagatctgttccctggtttatgcataacatccctgcttttgaggatcctattttcagtaattgtaaagaggccacattaaaaaatacgtatatatcaattatacatacccacctataataccctcaagaaaaatgcctcaaactgtacacattaacagcaaataaagagggggaggatttccaagtatcaaagagtttatttggatatcagcaaatcctctccccaagaaacaaatataaaactagacaaaagccatcatttctgggctttggaaatcacacaaaggcaaacaacaaattgagaagcatttattcatgaaaaattgctgaacttctagtaataaagtagaagtctcttattttcttgcctgtagctgcttccatcctcctgcccatccccaaactaattctaccatggtaggactggctttgaaaaccaacagctgacttgagctgagggtgggagaactctgcctagcagcattgtctaataaaagtagcaaactattgtcagtaaaattgacaaacttgataggaaatgccagttctgctcgcctcattagggcaagtgacagaatggcaaactagccaaaaattcaacagggagaggctggaaatgagaaaaacaaagaggggctaattaagctctccacaattttttctttttttttttttttttgcgacagagtttcgctctagttgcccaggctggagtgcaatggcatgacctcagctcactgcaacccccacctcctgggttcacgcgactctcctgcttcaccctccatagtagctgggattacaggtgcccaccactgtgccctgctaattttttattttttatttttagtagagacagggtttcaccatgttggccaggctggtctcaaactcctgacctcaggtgatccagccgcctcagcctcccaaagtgctaggattacaggcatgagcaaccacacccagcccacaaattcttgatgggattgtatgacctctcattttttggttttctcttgtccagtattttcctccttatgcttctttcttccttcacacccaaatgccaaaagtgcccctctctttctgccttttccctgagaagctatcctttttgaaaactgcctcttcagattgcatggtactttatagcgtcttccctgtagtccatgctccgatgtaccagaatatcaggagctagagagatcatgcattggcatttggtgttttttccattttatttacaattattttgaagtttggacattctctgtcttcaagtcatgctaagaacatgattgtcatgtagtttcatttttccttgtataatgttctgtattgtttataaaataagtattgggagctagaacataggctactgctgttatcttcagctacctagaagtcctacctctttattattattttttggaggggtggggggcggcatctcagtctgtcacccaagctggaatgcagtggtgcgatcatggcttactgcagccttgacctcccaggctcaggtgattatcccacctcagcctcccgagcaactgcaactacaggcacgtgccaccataccgggctaatttttgtattttttctgtagaaacagggtttcaccatgttgcccaggcaggtctcagactcctgggctcaagtgatccttttgcctcggcctttcaaagtgctgggattacaggcgtgagccaccatatctggatacttctttagaaacaattttactgagatataacttacatataccataaattcacccattgtaagtatacaagtcagtgatatttggtaaatttataaagctgtatgaccatcaccacagtttaggtttagagcatttccatcacccccaaatagttcccttatgcccaatttccactctcctaacccagcctgaggcaaacattgctctgctttctgtctctagagaaattttataaaaatgaaatcatataatctggacatttcatataaatgaagtcatacaatatattgtcttttgtatctggcttctttcacttagcattatgttactgaggctcatgtaatgtgtagtttattccttcttaattgctgaatagtattctattacatggatgtgccacattttgcttatccactcaccagctgatggtatctgggttatttccattttggggctattatgaataatgttgctgtaaacattcacatttaagtttctaagtggacatatattttcatttctcttgggcagatatctaggaattgaattgctgggtcttattctaagtttatatttaattcgctagttttaagaaactgccaaattgttttccaaagtgcctgtaacattttacatacccaccagcaatatataagggttccaatttctcagtatcctcaccaatatttaatattgtcaatgtttttttattataactattctgttgggtgaagaatggtatctaattgtagctttaatttgcatttccctaacaactaatgatgttgaacatttcttatttgctcattagcattctttgttgttatagctattcaaatttgttgtccattctttagttgtcttgttattgaattgtaagatacttctatgtattctgaatacaagttccttattaaatacctgatgtgcaagtattttctccgtctgtgatctgccttttcattttccagtagtgtcttttgaagtgcaaaagtttccaaattttggtgaagccaaggatagcaattttttctttttttgattgtcttttatgtgttgtacttaaatttctttctaatctgaaaatgtggatattttctcatgttttcttctagaagttttatagttccagctcttaaagtccattttgagttaatttttatgtaggatgtgaataagggtctaaggtcattatgtagtacatagaaatacacgtttccccagtatttttttgaggaaaaaaaaaaactcattttccccactgaattgcctttacaccttcatcaaaaatcaactgactataggtgttaagtgtttatttctggatttgtcattctgctctattgatctatatgtctattcgatgaatatatgctaacaagtgcctagactttgctctactgaggaccccactgaactaggatctcacaaaacatagccaataccacaaaaataagcaggaaaaagatgaacagtttcatacaaagtaacagaaaatgaaaactacacacatcagttaaggaaaattatcctcccccaaaacaatcatgatgtcaaagaaaactgtataacaccacaccaggcagaattagatacattggaataagcaactgggtatattgaaacccactctgaattataaagacaaaatgaggccaggcacggtggctcacgcctgtaataccagcactttgggaggctgaggcggatcacctgaggtcaggagttcaagaccagcctggccaacatggtgaaaccccatctctactaaaaatataaaaattagcctggtgtgatggcacatgtctgtaatcccagctccttgggaggctgaggcaggggaattgcttgaacccaggaggyggaggttgcagtgagctgagattgcaccattgcactccagccagggtgacagagtgagactccatctcagaaaaaaaaaaaagaaagaaagaaaaagaaaaaaatggaaaatagaaatggacaggagaggaggagggagggatggaagaagacaccaagaaaattgtccaggtgtggtggcttgcacctgtaatccaaacactttgggaggccaaggtgggaggatcccttgagcccagggactcaagaccagcctgggcaacatagcgagacctcatctctactgaaaaaaaaaaaaattagcctggcatggtggtccacgcctgcagtcccagctacttgggagactgaggtaggaggatcgcttggggccctaaacattaaggcttcaatgagtcctgattatgccactgcactccagcctgggtggcagagtgatagagtctcaaaaaaaaaaaaagtccactgaaacaaataaatgaaaataaaaagcataatattatccaaaaatgaaaaataagttacagggtacccaaatgagaataaactcataataaaacttaattaaaaacattgaaaatggcggaaaacaaaagaaaatgagaagtaaaaaagtcaaagaaaaagtaatggaatgggagataagacagagaagcaacagcgtttgtataattggattccttgaaaaagaaaaaataaaacaatgtaacagatacttgaaactaaaaatccaagaaaatgttgcaaaatatattcatgtacttttgcttatgtaagttatttgatctttttaccagaaggccctaaacattttttaaattaatcattgaaatataagagtatagctaggatatttcttggagctgattgttctaatttttctcagacacccaaagtgcactttcaggaaaaaagtatcgaacttttcaaacaagtatcaaacttttcaaaaaaataaaatataaggcaaggcaaaagcagaactacagttttcaaaaactcagtgactgaaagtgtgaaccaaggatagtatagtcatccatgatctccttcaagtatgaacgctaaaagaaacagttttcaatataggaaattctgtacccatgaacccttcttgaggaatactagaggaagagtttcatctaaccatgagatgagtaacaaagtgtcagtacaaggactgactatattttaataaatataaatgtaggcagaagataaaaggggtggaagacccatatacaaatactgtatgttaagtagaagtaatacaactttagaaaatgggagtggaacagagagtgaaagagtaagatagaataagctcactgatggttgtatagccaatagttgggagttaaaagagacaataaaatctcatatgccacataataaaaggttaactaggaaaagaagagactaaaggcattagaaaagacacaagtacaaaggtaaccactagaacaaaaccacaagccttactaactaccatttactttttattttttaagagatggagtctcactgtgttgcccaggctggagtgcaatggttattcaccaggcacaatcccactactgattgaccccctttccagtctggcccggttcaccccaccttatgcaacctggtggtcctcagctcccaggaggtcaccatattgatgccaaactcagtgtggtacccaatgggcattttgcagcccacaactcctgggctcaagtgataaataagtgagaagaaaggaaacacatacctcagagagaaacacagcaaatatatcaaaattcacaaaattataaaatattagtaaaagagttgaaacctagcatatcagtcatatcaattgatgtaaatggactcacctcacctattaaaagaaaaagattcaatttgctcataaagcaagatccagctatgtactgtaagaaagacatacatctaaataaaatgattcagaaagggtaaaaataaaggaatggggaaagatattcaggcaaatgaaaataataagaaaccaatagtaaccatactaattacagaattcaagcccaaaagcataaaatccaacaaataaaaaaaaaattaatgcaaatttcacatagataaaacacttaagaatatttgtacaacaaataatatagaagtcacctttataaaggaaaatctataaaagatgcaaggagatatagagagatatgaataataggagattttaacttactattcctttttttttttttttttttttggcagggtctcactcttgcctggcctggagtgcagtggcgtgatcatggctcaccacagtcttgacctcctgggctcaggtgatccacctcagcctcctgggtggctgggacaacaggcatgtgtcaccacatgcagctaattttttgtattttttgtagagatggcgttttgccatgttgcccaggctagtcttgaacttctgggctcaagtgatccacctgccttggcctcccaaagtgctgggattataggcgtgagccaccacacccagcctaactcactatgcttactacagaatagatcaagtaggcaaaaagtaacaagaaataatacctaaacataataatgtagatattatgaatattcatcaaattctattccttgataaaagaaaataagttttcttcctaagaattcatggactatttacaaaaaaggtatgttacttgctaaaatatatcattaaatttcactaaatattacaaacactctccaatcacaatgtaatacaaccagcaatgtttaacaagaaccaacatgccctttcttgtggaaattttaaaaccttttattaaacaatttttggatgaaagaagaaatacaacatgaaatttctaagaagtaattataataaaacactacatatcagaatatatgggatgtatttaagtaataatcagaggaaaactgataccactaagcacttttaccagaaaaaaaaatgagaaaagggaacaattgtaactcaaaagctttaaaaaataacaagacactacaccaaaataaagcacaaggaaagaaataataaagataaaaccagaaattaatgaggcagagcagggattggcaaacttttttcctaaatggcttcagtgtaaatattttaggcttatggaccatatgttctctgctgcaactatttaactctgttgtagcacgaaaacagtcatagacaatacataaatgaaccgatgtggctgtggtccaataaaactttatttacatggaactggagaacattatgttaagtgaaataagccaggcacagaatgacaaacttcacatgttctcactcatttgtgggaagctaaaaattaaaacaattgaactcatagagatagtgaatataataatggttaccagaggctgtgaaaggtaattgatggcggtggggatggttaatgggtacaaaaatacaatcagatagaatgagtgagatctagtatttgatagcacaacagggtaattacagtcaacagtaatttattgtatattttaataaaaataaataaatgagtataattggaatgtttgtaacacaaggaaatgataaatgctttaggtgatggacacctcatttaccctgatgtgcttattacacattgtttacctatatcaaaatatctcatgtacagccaggcacggtggctaatgcctgtaatcccaacatttagggaggctgaggcaggcagatcacttgaggccaggagttcgagaccagctcggcaaatatggcgaaaccctgtctctactaaaaatacaaaaaaattagccaggcgtggtggaacacgcctcaggaagagtgaggcatgagaatcgctgaaacccgggaggcagaagttttagtgagctgatcgcgcccctgcactccagcctgggtgacagagcaagaccctgtctcaaaaatttcatgtaccccataaatatatacacctactacgtatccaacaaattaaaaattagccaggcacggtggctcatgcctgtaatcccagcactttgggaggccgaggcaggcgaatcacgaggtcaggggtttgagaccagcctggccaacatggtgaaaccccgtctctactaaaaatacaaaaattagccaggtgtggtggcatgcacctgtagtcccagctacttgggaggctgaggcaggagaattgcttggacccgagaggcggaggttgcactgaggctagactgcgtcattgcactccagcctggacgactgggctagactccgtttcaaaataaaaaaattaaaattaaaattaaaaaaaagaaatttacaaagcaaaaaacaaaacaaacaaaaaactttatttacaaaaacaggcaaccagtccataagccatagattactgacacctcaggtagaagacaaagaacaaaacaaaacaaacaaacaaaaaactgtagtaagatatcaaatccaaatgtttttgaaacaacaaaatggaccaacttgatcaaaaaaaggagagaaaacaaaacatacaaaattaagaaatggcagagggaggaagggagaaattaaccatttaaacaagggagggttttttctttttaatcataagagactacttcgcaaatttctatgcaaatgaatttgaaaacttagaaaacaatagataacatactagataaatacagattgccaaaagtgtccaccactgaatttagaaatctgaagcacaccaattttcataaaagaaatagacaagattattaagaaattaccctgtaaaagagcaaaaggcccagatgaccaggtagaattctaccaaaaccttcaaagatcagatattctgaatgctctataaattattccaaagcattgaaaataaagaaaaacttttccacagaaaaatgacaagccaatatcattcatgtaaaaaatattaagtaaaatattagtgaaaaaaatccaacacttggatccaccctgaaaatacaaggttgttttagtgttaccaaatccattaatatcatataccatattaatagatctaaggttgataaaaatcatacaattatttatatagatgttgaaaatgcctttgacaaaattcagctcaattcagctcccagtcctgatgaaaacacaacaggaattgagggacactcactttacgtaagaaaaacaatatattttttaaattctcttttaaagtttccactttgtctcttacatagtgtcacatatcttaaaagatttgaaagtgattctttttaaattcattccaccaatctcttccttttaattggagggtttaatccatttattattaatgtaattactaaataagtcaggatttacatcagtcattttgctgtcatattctacattccttgtagctattcctctattcctcacttattgccttctcttgtgttaagtaggtattttaatacccttgtaatttctttggaggatttttcttttgtggttcacctgatgattataaatcttaatttataacaacttagtttgttttaatatcaatttaacaacaatagtatataaaaactttgctcctgtattgctccattcctctctcttgctcctttgtgttgttataaattacgtctttatacatacacatttgtgtgtaataaagccttaaacattatattggtttgtcctcacattcttataaagaaatacctgagactgggtaatttataaagaaaagatgtttaattggctcactcttactcaggctgtacaggaagcatgatgctagcatctgctcagtttctggggaggcctcaggaaacttatagtcatggcagaaggcaaagggggagccagcacttcacatggtcagagcaggaggaatagaggggtttggggggaggtgccacacacttttaaaccaccagatctcatgagaacttacttgctatcacaagaacagcaccaaggggacagtgctaagccattcatgagaaaccactcccacgatccaatcacctcccaccaggtccgacctccaactctggggattacagtttgacatatctaatgtcaaatttgatttggtgaggacacagatctaaaccatgtcagacactgtataaacaaaatgaatgatcctaggactaaattaaaaataattagattaggtacagccctaaactagttcttgtatttcaaataagtcaacttctctggttgcctcaattttctcatttgtattagattatcctttccaaggtctaaaattatttattgtagaacaaataaaccttgtatttgcagtaaatatatctactttgatatttacagctagaaattaactacaatactggttggtttcctgctattataatgaaccagtattgaattcatacataagaaactccaaatgaaatactatcttgttaaaagttgttaaattttggcgtgattttatttgattcatgtctaagcagttttcctttaagttggaacaaaccaaaaatactgatctattcagaatcctggtgtgtgcctataaacaatataatggatgaaaattttcagtgtttacaaaacaaagaaattgtcaacagaatgcctggcagtagacttaccagaaaaaaaaaattacagcctataattcatgaagattggctcaaaacaaactgtccctgccaacagaaaatctgacaattattctgttgtctaatttggctcagcctaagttgaccttgtttattcatctcagtcttttaattcttgttaacttggcatgagaggagaacatatggcatatgtctaggagtccatttctgtatcttaaactgaaataaatgtagaatatactaagcatttccagtgtgttgagctcttaaggtagctttaatgtatattacataaaactgtaagttcatattgtgcccaccaggtgctttatgtttgctgcctataaaaccagaaactcactagagacatccttttctaagccttggtatatgattaaatgtgtctaattttaaacatctttccaaagaagataaacaatcttaagctcttttaaaacataaaaatgaaagggtataatcaatttggcaatctaaagatgtttacacgttttcactgactctatagctatttttaagaaaactgataatgtgagaaagacaatgggagttgaagaacaaaaagatttccattttctctccagcttaatctggcctattttcttagtttctttttctgatccactaaagcttattgagtaagagaagttatattttattgtggctttaatatgtctcaagaaaagctggaaggaaatgagctgctttatagattcacagctcttttatggaactgcagttagttctccagtaccagaactagacaaatgaaaaacttagaaaatctaaggcaccaaaatttatgtattttaagaagtgttttcacttggaatgtttcattttctttttagtaactaagtcaaatgaggtataatttcatgtataaagccttatctatattacatattttgaaatccttaacctttattagtggactttatgtgacatttactatttgcatagtacttttatcccacaaagctcagagcattcaaacttcataagttgcattcaaagatataattttttaactacaggggttcctaattacccaaatattcattatctgagaccctgtagttatgagtttacatagaacaatagtccttataacatgaaatatttaataataagttaactacttgtaaactcagtcctctccccattcaaatatccctcctcagtgaagactagcatttatccccacctatgaaatattagtttatcagtattttcactgattgtcagctctttaaatacccaacacagcaatacaaacatatttcaaaacaactaaaaatcttgcaaaaacaatgtttcatgaagtcaatgaaagagatgttacagaaatgtccagatctcatgtaaaactattgataaatcaggaaaaggaacttagaccaattaaaaagagaaattcaacaagaataataaaactgcaaatgaatttatcaaagtattaatagaatccctcagaaaagtgattaagtccttgaatattttttgaaaaaaaaaatggtcctctttctgaacttgcatgctgtgcaagtcgaatatgaagttaaatatgccatatcatactgtaagacaatttggtcagaaaaagtagacccattccccactctccagatcaaactgactgactttgttccatctaagaatttacgcacagatggctgggcacagtagctcacgccagtaatcccagcattttgggatgctgaggcacacagatcacttgaggtcaggagttcaagaccagcctggccaacatgatgaaaccccayctctactaaaaataaaaatacaaaaattaactgggtgtggtggcacatgcctgcagtcccagctactcaggaggccgaggcaggagaatcgcttgaacacaggaggaggaggttgcagtgaattgagatcgtgccaccgcactccagcctgagcaacagagcaagactccgtgtcaaaaaaaaaaaaaagaaaaaaatgaatttatgaacagttgaaattacaacatatattttattaatacaagtaaaataagcttatctatatatttttacctcttatttttagtcaaattatattgtcaccatttattatgattttcaaccccagtttaaattgattcactttaaggggctttttttgttttattttctgaaagcagttattctcagatatggacctcctgcagctttgttagtgaataatgaaatattgaagtgtgtgtttcaaaatcatgaaatattgccattgcagaacagccagaaatgtccttttcactatttctttgggtctatttattatctctgtgccatattctttgaatctaggttcacatacctttctgtgtcaagaaggagtgacaaaaaggttaagaaattcagactttcagagagggaattatggaaagtgaaaagcacataaggaatatggcgccatttatatatatatatgcaaaaattataactaaataatagatgcttttgtctttggtgtttcctgcacaactgaaaatggagctagacaagggtactgaactgccttctgcagatatggcagaggcccagaaaattccttaagtatgccctgactcacttccacagcatcatgtagtattttccttacagaccatatctattaactatggttcaacgtacatcaagctttgtatgcttcttcccacagatacactgcatatctggaacaagggagaagagcacatgtcatctgcaaatcccctatatttatacatttttattattttgctttcttacttatggttctataagcaaatttggggaaattgttgctttgtgtcccaagtaatgcatagtagatggtgctgtgggcttcctattacatcacaacatgagatatataatgtattttagtgaagcaaagactgattaatggaattctccattataaacttccccatcaacctttcacctgatgttttttaaatcactgatgaacattgcctagattattttattaggggttgtgaaatgatgattttctaattttgtaactccttctgcatttataagtttgagtacttctatacataataaaagtttccttatcaactattcagttacctcgaaaggcagagtaaatgcttgataacttccctagatttatcagtttttaggataataaattaacccagcaacccccagtagtggccactgtttgggtagtaggggaggggaggttcatatggatttttaaatatcatttgatgtattttaatgaattgtggtcaatattctttgtgatagtcaaatttgtaaatcagtatcaatctttcagaaactaattttagcaacatataacaaaagcccaaaaatgccataactttaaatttcatttttgtaatataaacataaaaatgttaatcacattgttattgtataagtgaatgacctaaaaatatatgtggggaattaatgactaaattacagtatatctaaataacagatactatatactcacttaaaaatcacgattatcaggttctggttcctggtaagatggagtaagcacattcctcctgtctcacccattgaatgcagctaaaaatcctaggtagaatatattggagcagctgtttggggagtctgaaaagtaaataatacagaagaaataaggacgaagacaagaacttaaggtgcctctgaacctatggcaagtttactagtgtgttttcctttagttcaccaccacttgggcctagtcaagtgcaaccatggaggtacatggaagcataagataactaaagatgcagcttcctggatccagaaagcaccaaaggagattgcagacatgaaagcttgtgaaaacaaccccattaaattgtttataaactccagggcttaccccaaggtatgcatgtgtggatctgattctaaccagtatataaaagactttgagatctaaactgatagataaactatcacccaggttatatatttgctactggatggtacacacactgacagcactgcagatatcaccaaatagcacgacaaacagccctgcaaagaggctttgaaaagtaaactgacataccatagctcacagaggaacactgtaacttgaagcctaaacataagataattgcttgctaaaacaaaaataacattcatcacagaattttaacaagatcaagtcttaaaatactcaaaatgtccaggataccaaaaattacttgatatataaagcggcaggaaaatctcaactcacatgagaaaagattagtaaaagacaataatgctgagatgacaaatgttggaattatctgacaaactttaaggagctccaacaatcattaaaattactgaaacaagccaggcatggtggcatgcaccagtagtcccagctacttgggagactgaggcaggaagatcacttgagcccaggagttggagggtagcctaggcaactagtgacacctcatctctttaaaaaaccaacaaacaaaaaaaaacccaagtatcaaaaagaaatagaaggtataaagaagaaacaaataaagaattcaaaagtaaattaaccaaaaaaaaaaaaaaagtttttttttgagatagggtctcattctgtctcacaggctagattgcaatggtgcaatcacagctcactgcagccttaacctcctgggctcaagcgatcctcctgcctcagccacccaaagagctgggactacaggggcatgccgccacaccctgctaatttttgcttttttttttttttttttttttttttgtagagatgaggttttaccatgttacccaggctggtctcgaactcctgaactcaaatgatccaaccacctcagcctgccagagtgctggcattacaggtgtgagccaccatgcctggcccccacaaaattttttaactcattgataggtttgataatagcagaatagagataacaaagggaagtcaatgaacttgaagacagatcaattgaaagtatccaatgaacaacaaagaaaacatatttttttaaaaaaatgaaccgagggacctgtgaggcaatgccaaaaggtctaacattcatgacattagagctgtagaaggagaggataaagaatgcaatgctgaaaaatatatatatacaaagaatacctgaaaacttcaaatttggtgaaggaaaacttagtaaatatgtttccagtagatttgttactaaagaattactaaaagttcttgagacataaggtaaatgataccagagggaaacttgggacaccagcaaagaaggaaaagatgataaaagagccaatttatcaagaaagcataacaattctaaatgtgtttgcatctgacaagagaatgtcataatatataagaaaaaatgatagagatcacaatgggaacagacaaatctacatttgcatttgaagactgcatcagtcctttctcaacaactgatagaactagtgacagaaaatcattccacccagaacacacatccttttgcacgtgaacatttaccaaaacagaccatatcctgggtcataaaacaaacctagaagaatatacaaagtatgtcctctgaccataatgggaatagattagaaataaataacagaaagaaatagagaaaattctccaaacgcttagaaattaacaaacttctaaataatccctaggtcaaagagatggtcttaaggaaatcagaaaagattataaactgaaaaaaaaaatcacagcttaaaataagaattttactcaattaaatgcttatatgagaaaagaagaaatgcctcagtcaacaatctaagcttccatctaaacagactaaaggaagaaaagcaaagtaaactcaaaggaagcagaagaaaggaaataataaagagcatatatcattgaagttgaaaacaaaaaaattaatgaagtcaaaagcctgtttgaaaagatcaacaaaattgaaaaaactctagtcagacaaagagaaaaagaagacatagattattgatatcaggaacgaaagagggtacattatcttaaactttaccgacattaagtagataaaaaataatgtcatgaactactgtatgcaaataagtttaacaacatagtttgaatggaataattccttgaaagccacaaactaccaaactggcagaaaatgaaagagatcatctgaatcctatggctattaaaggaattaaatttgtagtttaaaacaaaacaaaaaactctgtaaaagagatctccaggtcccgatggtttcactggtgaattcgttgagagaaaaatatactagcaattgtgcacatttctttcagaaaatatgagatgataattcaacacatcccagctcattttctgaggctattacccaaagacagtacaaaaaaagatatcaagcagtcccatggaattttttacaaaacgaaagaaaaaaaagtacaaaaaactatagactactgtctctcatacatatagaagtaaaaatcctcaacaaggattaagaatttagtaatatataaaaataatagtatactagaattaagtgggatttaccttgggaatgcacagcttattcaatattcaaaaattaatgtaatccacaattttagcaatataaataagaaaaatcaactgatcaaatcaactggtacaaaacgcatgtctgacaaaattccatacccattcataattaaaaaaaaaaaaaaagcccagaaaactaggagtagaagggggcttcctcaaactataaagagtttctaccaagaaggaaaaagagaatactacagctattatcctacttgatagagaaagactgaatgttctcctcctaagattggaaacatggtaaaaatgtccacttttaccactcttatggaacactgtactaaagaagaaatgaaaccatccctttttgcagacaaaatggttcctacaactaataagtgcatttagcaaggtcacaagatatatggtcaacacataaaaatcaattgtatttcttttgtttcttttttttgagacagagtctcgctctgtcacccaggctagagtgcaatggcacgacctcggctcactgcaacctccacctccctggttcaagcaattcccctgcctcagcctccctagtagctgggattacaggtgcatgccaccacgcctggctaatttttttgtatttttagtagagatggggttttaccatgttggccagacgggtctcgaactcctgaactcaggcgatctgcctgcctcagcctcccaaggtgctgggattacaggcatgagccaccgctcccggcccaattgtatttctatatactagtaatgtacaattgaaaaccaaaaaagctttttaaattacagtagctccaaaataaaagaaatactgtgttataagtctaacaaaacattccatctgtatgctaaaaacttaagaagattaaaataaatgggcctggcatggtggctcatgcttgtaatcccaacactttgggaggcctaggagggcggatcacatgaggtcaggagttcgagaccagcctgggcaacatggtgaaacaccgtctctgttaaaaataaaaaaaaaattagccgggtgtggtggcacacgcctgtagtcccagctactcgggaggctgaggcaggagaatcgctggaatccggggggcggaggttgcagtgagccaagatcccgccactgctctccagtctgagcaacagagcgagactctgtcaaataaataaataaacaaataaatagacgtgtttacggtttggactcaatatagtaaagatgtcagctgtctcctgactaatctaaagatttctgattaatctaaagatttgataaaattctgatcaaaatcccagaaggattttttaaagatatcaacaagctgattctaaaatttatacaaagagacaaagaagctagaataacaaaaaacattttgaaaaaggaaaataatgttggaaggatcatacatgatcttaggacttttgctaaagcaggggttgacaaacattttctgtgaagggccatttagtaaagatttttggttttgcaggtcacatagtctgtcacaactacttaactgtcatcatagcaaggaagcagccatagataatataaaatgaaggtgttccaataaaactttatttactaaaatatgtatgaactggatttggcctagggatgtggtttgccatccccaaagctataactaatcaagaaattacagtattagtaaaaggacagacacacagattaatgaaacagaacatataacccagaaatagacccatataaatatgcccagctgatttttgacaaaagtacaaaggtaattcaatggagaaaggatagtttttcaacaaatggtattggcacaatacacatctatgcacacacagacacacaaagaatctcaaactaaacctcacacattactctcaaaaattaactaaaaataaatcatagatctaaatataaaatgtaaaactatcaaacttttagaagaaagcataggaggaaatatttgtgacctgggattaacaaagaattctccaactagacaccaaaagcatgatccattttaaaaaaattggtaacttcatcaactgttgttcctcaaaaggcactattaggagcctgaaaagacaagctacatgatgggagcaaatatttgcaagtcacatatccagcaaaggagttgtatccagaatatatacagaactctcaaagctcaacagtaagaaaacaaatagcccaactacagtggtcaaaagacttggacggacatttcaataaggagatatatggatagcaaacaaataaatttaatatcatgagctatttgggaaattgaaattaaaaccatgatgagatagatacctctgtacacctattagaatgtcaataatttttaaaaatactgacaattccaggtgctggtgaggatgatgcaaagtaactgaactctcattcattgtcgcatgaaatgtaatataaaatggtacaactcttctgggaaatggttttgcagtttcttataaagttaaacatgtattcaccatatgattcaacaatcccattaagtatttacactagaaaagtaaaaacaggttcacacaagaaactgtacatgaatgcttgtagcagttttattcataattttcaaaaactgagaaaaatacccttcaacaggtgaataaataaactggtacacacatctgtaatggaatactgctcagcaataaaaagcagtgaaccattgatacacgtttaacaacttggatgaatatcagggcattatactgaatgacagaagtcagtcacaaaagtttatatggtataattccaatcatacaacattcgtgaagtcaaaactatagttatgaagaagatatctgtggttgccagggtgtataggttgagggggtgtgactataaagtatataagggagggttttttggcatgatgaaactgttctatattctgtttgtaatggtaataacaggaatctaaacatctgttaaaattcacaaaactctataccttaagaaagtcagttttaacatataaacagtacaaattttaaaacaaaaaaaaataagtgaaagatgatgacatgaaatttcacaagaccacattatctcagttttatttttttaaaagatacataataataagtagtggagctaaatatccagagaacaactctggatatttatattattctttttctatgttttggtggggggttttctacatcaaaagtgaattacttttacaagtttataaaacttcatcattcattttaattttgtaataaccatgagttcagagcatcacatttggtttccatgattgtttctcttaaaacttcatatgtaaaatacattatctgtatgttaaagtttaatttaactgctctttgaaatgtccggtaaaatatttaatggtggaaaaattaaaagtggctttctctgtttttaaatataatggtatttaaatgattactatattgttgaaagtttccaaagaaattttttaattacattttttaacccagaaaytttaaaatattttaatactttaaaatctataacttatacctaaccttaaaattttcttttttaatcctttttccaattaaaaacacccatatactgcagacaaataattgacagaaggaatgaacttgaaaaagacatctgttctggatttttgatgactaatacctgtaatgcagaaggtaatggtattcaagacacccaagtattcaaagtataacagaaaaactatgttatagcttgcaagaactttcagtaaattaataaaaataagaaaactctgagcatttctagttggtataagactgcttgtcattgatataaaataccaagttgcctgattattacaaaggtgaaatttcaatgatcatacaaataaatatagataaatttggagatcttgttaaaaagttgattctgattcagtagatctgggctggagcctatggctctgcatttctaataagctctcaagtgatatgctgctagtatatactatagtatatactgtacrtagtaaatactgtaatgcaaggtagccatacacatatatatgaaaatgattggcactttcatactatgttaaggtttggttttttatttctctagagttctcagcattgtaacttgttattattttaagcatttctgtttttagtgttgtaaaaaaattttcttaaggtccattattagacttttaagataattaatgttttaatcttttactttagacggagaactgagagaagacggcagagaacaggtaaaacactttctctgtttattactagacatttaaattctaagagaaaagcataatgtatgtgattattttgaactcaagaaatgctatctattggtctacattaactggactacattaactagattaactggtctatattaactacactaacagcttctaaaaaactattcagcttttcagtattcccaagttgtaattattatttaaaagctattttaaaataaaattgtgcataacagagtaggtacaaatgaaattacacatcttcaagttgactcaaaatgattcagtagggagaaagtagaagggatataggtgaattaagagtaaccagatgttggcagggcgcggtggctcatgcctgtaatcccagcattttggcaggccgaggcaggtggatcacttgaagccaggagtttgagaccagcctggccaacatggcaaaaccctccctactaaaaatacaaaaattagccaggtgtggcggctgcacctgtaatcccagctgcttgggaggctgaggcatgagaattacttgaacccaggaggaagaaattgcagtgagccaagatcatgccactgcactccagcctgggtgacagagcaagactctgtgtcacagaaaaaaaaaaaaaaaagagtagccaggagttgataactgatgaagctgggtagcgggtaatacagcagtttgcaaatgtcattctctctttggtatatgtttgaaattatccaaagtaaaaaatttaaaaataaaaggtgtataataatgattaaattattcaatatattttattacatataatttttataaataatgcatataaaatatcacatctgacaggtagttctgaacccttctccctctctgtctctgacatcgcatctcagttcattttgagaggaaatagcaattccctgttataccaattacagaaaggctaggatttattgtgagacttgagtctgaatgatagtcccacaatttctagcattataactttgggcgagtcatttcatctctctaagcctcaacttcttcattcctaaaatagagataatgccacacactccacgggatttttatgaagctcttttgtgaacacaaatgtgataggactttgctaattatatggaactatactaatgatagtaatggtcaatatcattgcttcaatctacttctttctggacatacctgcattgaaaataaaaataataatctttatttgcttggagggaaatacgccatattacagttgaatatacatgcctaagaatttgtttaatttgcgaaagcttcaagaaactttaccataaattgtatatattttaaatagcttatttttttagaatacttgttttaaaaaaagaacaacaacaacaacatcctggccaggtgcagtggctcacacccaagcactttgcgaagctaaggaaggtggattgcataagcccaggagttcgagaccagcctggacaacatggcaaaaccccatctctactaaaaacacaaaaagtagccaggcacagtggcgtgtacctgtagtcacagctactcaggaggctaaggtgggaagatcacttgagcccaggagctggagattgtagtgagctgagatcacaccactgcactccaccctgagcaacagcagagtaagaccctgtcttgaaataagcaaacaaacaaaaaaacagcatcctgtcacaactttacagacacatccacttggataaacaagtgtacatgaaattcaatcaagaaactgacttcccaaggatctttctggaagggtctttatagagaataagggaaatatcagtttgtgtactaaagtataggatggtttttgtaatgtaatctgtcacaacactgagttcagttactaatatagcttaaattcagattagcactaactcatatacactttatgttcagtgctctggtttcttgtttagaaattgctattaagtacagataagatacagattataacaggctgtcattgtttgcaaagtcttcttgtgaaatttccacatgctacattttaaagtagggtttctgcatatgtgtgtctttgcataattttctattgctataataactatttttcaacatatttctcttaatcaacttttttctcaaccaattgaatatattcaacaaaaataataataaaacattattgttagaatttatcaagtacttcttatttgtctggttctggactcagtaccttatgttttaattcagttaattctcacaacaaacctatgagatggatactactattagcctcatataaacaatgatactgagacatagagattagtaatttcccatagtctcccaggttgtaaagtgcaaagctggaattcaaacccaaagagtctggctcttagaacagggtttctgaaccttagcgctattgacattttgggccaaataattatttgctcttgggctgtcctgtgcattgtaggatgtttagcagcaatccctggcctctgtctactgaatgccagtagtttcccaaccccagtcacggcaaccaaataactctccagacattgccaaatgtctsctggggggaggaagatagtaaaaagtcatycttggttaagaaccacaaccctagagaaacccctatatgacatcacctctctgaaagccacacatacaaaaatatggaaagccagaaaacaaaataaaaatcaccttcatcccaccattgagagaaaaatcattaacattaccggtacctttgaagtcccctgggtgtccctcctcaattacatttcttcttccatctactctcagtcttaaattttgtcttaaccattcctttgcttgtctttatggttttcccatatgaggcaagttccataaataaaatcttttttttttaagagaaagagtctcactctgtcacccaggctggagtgcagttgcatgaatacagctcactgtaacctcaaactcctgggcataagcagtcatcccacctcagccctctgagtagctagaattataggtgcatgccaccatgcctagctaattttgggctttttgtagagacagggtcttgctatattgttggtctcaaactcatttaacaacttgtttagttttacttctttctgaactttatataagtggaaacatagtgcattcttcttgttacttacttttttcactaaatattatttttgaatatagccatgctgacatatgtagatgtaggtatgttcattttcactgcctatagtatttcaccgactgaatacaatttattcatccactactcagtttattcattcttctgttagtggacatttatgttgattctagctttttctattacaaacagggcaactatatattcctagggtatatacttaggagtgaaatttctggtcacaggcaatacacatctttaattttaataaataattccaaatatttcctagagtarttttgccaatttatatttccactaaacaagtataagagtttccatttctccacatcttgctaatacttaaacactcaggtttttaaatgtttgccatccctagtagctgtgtagtggtttctcattgaggttttaatttgtatttgcctgattaataatgaggttgaacatcttttcatatgtttcttgtcatcttgtttcttcttccttgaaatgcctattcctatgttttactcatttttccactgagttctttgcctttttctcactgatttgtagtagtctttatatattttagaaactaatcctttgtcagtgttacaaataactcctcccaagttgttgcttatctttttcctgtctttgtggttgacgaaaaaaatttttgactatattaaagacaagaatgcaccattatacctttatggtatgcttttatatcttgtttaagatgtccttccttatttccaatctcatacagataatctccttttattaaagtttttacctttcacatttgtctttaatccattggggtttgggatgtgtgtgtgtgtgtgtgtgtgtgtgtgttggctcctgtgtccttttaaccctattagtctttggcagcagcttarcttttatggcatgagatgtcccagactcatcttgtaaattccttgtaaattccctgtcttacacctagaatctactatttctccatttcttctgttttctctgggttaatcttggcttttagacttttttagtggacagaaaagaaaatactttttttttttttctcagccaggagtagtggttcacacctgtaatcccagcactttgggtrgtgggtggatcacgtgaggccagaaattcaagaccagcctggtgaacatggtgaaaccctgtctctactaaaacaaaaacaaaaacaaaaacaaatattagctggcgtggtggtacacgcctgtaatcccagctactcgggagactgagacacaagaatcgtttcaacccaggaggcagaggttgcagtgaggaaaggtcatgccaccgcactccagcctgggcgacagaatgagactctgtctcaaaaggaaaaatgaaaaactttttttttcttgatacagtgtctcattctgtcacccagactggagtgcagtggtgtgatcacagctcactgcagccttaacctcccaagctcaagccatcctcccacctcagcctcctgagttgctgggacatttttatcaactctcaggaatcagcaacagaaagacattaattggtatctccagtccaggcttcatcccaggcttcaaactgataatacctacaagccaatgttaaaataactgttccttctaggaagttccataccatcttgtacttttcctatcaccataaatatcactttttattataactctggtttaattatctccttcactaggctgtaagttttttttttttttttttttgagacagagtcttactctgtcacccagactgcagtgcagtggcacgatcttggctcactgcaacctctgcctccgggttcaagcacttcccctgcctcagcctcccaagtagctgagataacaggcacgtgccaccactcccagctaatgtttgcatttttagtacagatgaggtttcaccatgttacccaggttggtctcgaactactgagctcaagtgatctgcccaccttggccccccaaagtgctgggattacaggcataagccaccgcacccagcctattaggctgtaactttctaaaaggcagtatctgtatccattttgctcaacatcttactgttagcaacagacatggaattctatcgtgaatgtttttaaaataacgtaggcaaaaatgcatggataaagaagtctttgactagataatatccaaaacataagatgtcttaaactaaactcatcattttcccctcaaactccaaacttgctcctccatatgtrgtctctgtcgttcttgattctctataacccacttacaattaatccaaccaatcaaattcaattgattaatgctcctaaatatttctagaaactagccctataaccattggaatttaggttaatcaatcatcttcacttggagtactgcttcctaattattatctttgtctttagtctatacccactaccaccaccaccacctcctgaaatctagcctccacaatgctgctaaagtaacctacctaagtatcattcccctccctaaaaccccataggataaagtccaagctccttatcatggtgtataagactctccattaactaacctgtgctttccagttttatttcctgccactctttacctcaaagagtctgagttacttcattcttacatccctaatacttattatatcactttgagcactataggtgtcactaaatgttgactgaaccaaactagacctatgcaggcttaggtaccttctcagtaacactagttttaccaaaattttattatgaaaagttttaaatatacartaaagttctaagaaggtacagtaaacatccgtatgcccactatttggattcgaccattaatgtcttacaataattgcgttatcacttatctgtccattaacctgtccctttatcaatccatcttatttttttcaacttttattgcattgaaacatcttatttttgatacatttcaaagtaagttgcagatatccatacacttcgcctctttagccactttagcatacatatcattaacatgttaaaaactctcggccgggaacagtggcttacgcctgtaatcccagcactttgggaggccgaggcgggtagatcacgaggtcaggagatcaaggccatcctggccaacatggaaaccccatctctactaaaaatacaaaaattagctgggcatggtggcgtgtgcctgtagtcccagctactcaggaggcggaggcagagattacaatgagctaagactgcacgactgcactccagcctgggcaatacagcaagactctgtcaaaaaaaaaaaaaaaaacacgctctcaataaactaggtactgaaggaacatacctcaaaataataagagccatatatgacaaacccatagccaaaatcatactgaatgggcaaaagctggaaacattcccctagaaaactgacacaagacaaggatgccctctctcaccactcctattcaacagagtattggaagttatagccagagcaaccaggcaagagaaagaaataaagggcatccaaataggaagagaggaagtcaaactatccctgtttgcagacaacatcgtcctatatctagagaaccccataatctcagcccagaagctccttcagctgataaacaacttcagcagtttcaggacacaaaaccaatgtacaaaaatgactagcattcctatacaccaacaatagccaagccaagagccaaatcaggaacacaatcccattcacaattgttacaaaaagaataaaacacctaggaatgcagctaatccaagaggtgaaagatctctacaatgagaactacaaaacactgctcaaggaaatcagagatgacacaaacaaatggaaaaacattccatgctcatgaacaggaagaatcaatattgttaaaatggccatactacccagagcaatgtatagattcaatgctatttctattaaactaccactgagattcttcacagaactagataaaaactactttaaaattcaggcccttttcttttgcagctgggaggcaggtagcccaggacaagttttcaagcccatcatgccctctgcctggaaaaagactcaggactgttgttggggggcatggtgggagtgagacaggcccttcagtttgcatgggagctgggtgaggccagtgactgccggctttcccctacttccctgagaaactgcatttctcagcagaggcagccataatcctcttaggtacccaactccagtgacctggggatctcacccccatccgccacagcaggcacagcaagacctgcccaaggagagtctgagctcagacatgcctagccccacccccacctgatggtacttccctatccaccctggtagtagaagacaaatggcatataatcttcggagtgccagggccccacccaccactggtccctctctatattactacagctgatgctttctggaaagcgcacctcctggcaagagtccaaccagcccaaaaatagagcattaaaccaccaaagccaagaaccctcacggagtccatcacacagccctgccatctccactggaacaggcactggtatccatgaatgagagacccatagatgcttcatatcacaggactctgtgcagacaacccccagtaccagcctggagccagataaaccagctgggtagctagacccagaagagaaacaacaatcactgtagtacagctcacaggaagccacatccataggaaaagggggagagtactacatcaagggaacaccctgtgggacaaaagaacctgaacagcagccttcagccctaaaccttccctctgatagagcctacccaaatgagaaggaaccagaaaacaaaccctggtaatatgacaaaacaaggctcttcaacacccccaaaaaatcacactagttcagcagcagtggatccaaatcaagaagaaatccctgatttacctgaaaaagaatttagggaggttagttattaagctaaagagggatggactagagaaaggtgaagcccaattttaatgcgaggaaatccaaaaagtgatgcaacaagtgaagggagaaatattcaaggaaatagatagcttaaagaaaaaacaaccaaaaaatcaggaaactttggacacacttttagaaatgtgaaatgctgcccaggcatggtggctcacccctctaatcccagtactttgggagggtgaggcgggcagatcacaaggccaggattttgagaccagtctggccaacatggcgaaaccccatctctactaaaaatacaaaaattagctggacaaaaatacaaaaattagccagggaatcactggaacccaggaggtggaggttgcattgagccattgagccgtgccactgcactccagcctgggtgacagggygagactccgtctcaaaataaaataaaataaaataaaataaaataaaataaaaagggtaaatgctctggaaagtctcaccaatagaattgaacaaggagaagaaagaaattcagagctcgaaaacaaggtctttgaactaacccaatccaacaaggtcaaagaaaaaagaagaagaaaatatgaagaaagtcatgaagaagtctgggattacgttaaacaaccaaacttaagaataatcagtgttcctgaggaagaagagaattctaaaagcttggaaaacatatctgggggaataatcaaggaaaacttccccagccttgctagagacctagacatccaaatacaagaagcacaaagaacacctggaaaattcattgcaaaaagatcttcgcctaggcacatagtcatcaggttatccaaagttaagacaaaagaaagaatcttaaaacctgtaagacagaagaaccaagtaacctataaaggaaaacctatcagattaacagcagatttctcagcagaacccctacaagctagaagagattggtgccctatcttcagcctcctcaaacaaaacaattatcagccaagaatttagtatccagcaaaagtaagcatcatgtatgaagcaaagatatagtcgttttcagacaaacaaatgctgacagaatttgccattaccaagccaccactataagaactgctagaaggagctgtaaatcttgaaacaaattctggaaacacatcaaaacagaacctctttaaagcataaatcacacaggacctataaaacaaaaatacatgttaaaaagcaaaaacaacaaaaaaaacaaagtacgcaggcaacaaaaatcacaatgaatgcaacggtacctcatatttcaatactaacattgaatgtaaatggcctaaatgctcctcttaaaagatacagaaccacagaatggataagaactcaccaaccaactctctgctgccttcagaagactcacctaacacataaggactcacataaacttaaagtaaaggggcagaaaaaggcatttcatgcaaatggacaccaaaagcgagcaggggcagctattcttataccagacaaaacaaattttaaagtaacagcagttaaaagagaccaagagggacattatataatggtaaaaaccttgtccaacaggaaatatcacaatcctaaaaacagaggcacctgcggtgacatgtgcctgtagtccccgctactccacgaggctggggcaggagaatcgcttgaacttgggaggcagaaagtgtagtgagccaagatcgcaccactgcactccagcctggatgacagcaaaactctgtctcaaaatatgtatatagatgggtgtgtgtgtgtgtgtgtgtgtgtgtgtatatgtatgtgtatatatatgtatgtgtgtatatatgtatgtgtatatatgtatgtgtgtatatatatgtgtgtacacacacacacacacacacacacacacacacccctaacactgcagctcccaaatttatataacaattactaatagacctaagaaacaattactaatagacctaagaatagacctaagacctacactactccactgacagcactagacaggacatcaagacagaaactcaacaaagaaacaatggatttaaactataccttaaaacaaatggacttaacatatataaacagaacatttcatccaacaaccacagaacacacagtgcatggaactttctccaagatacagcacatgatagcccataaaacgaccctcaataaattttaaaaaattgaaattatatcaagcacgctctcagatcacagtggaataaaactggaaatcaactccaaaaggaaccttcagaaccatacaaatacatagaaattaaataacgtcctcctgaatgagcattgagtcaaaaatgaaatcaagatggaaattaaaaaattatttgaactgaatgacaataatgacacaacctatcaaaacctctgggatacagcaaaggcggtgctaagatgaaagttcatagccctaagcacctacatcaaaaagactgaaagggcacaaactcacattctaaggtcatacctcaaggaactacagaaacaagaacaaaccaaactcaaacccagcagaaataagaaaactgccaagatgagagcagaactaaatgaaattgaaacaaacaaaaaatacaaaagataaatgagacaaaaagctggttctttgaaaagataaataaaactgatagatcattagcaagattaaccaagagaagaagagagagaagccaaataacctcaataagaaacgaaacaggagatattacaacggacaccactgaaatacaaaagatcattcaagtctactatgaacacctttaggcacatgaactagaaaacctagaagagatggataaattcctggaaaaaatacagcccttctagcttaaatcaggaaaaattagataccctgaacagaccaataacaagcagcgagatcgaaatggtatttttaaaattaccaacaacaacaaaaaaaagagtccaggccagatggattcacaggagacattcagattctaccagacattcaaagaagaattggtaccaatccttttgataccattccacaagatagagaaagaaggaaccctctgtaattcattttatgaagccagcatcaccctaataccaaatccaggaaaggacataaccaaaaaagaaaactatagaccgatatccttgatgaacattgatgttaaacttcttaacaactactagctctagctaaccaaatccaacaacatatcaaaaagataatccaccatgatcaagtgggtttcataccagggatgtagggatggtttaacatatgcaagccaataaatgtgatacaccacagaaacagaattaaaagtaaaaatcagctggacatggtggctcatgcctgtaatcccagcactttggggggctgaggcgggtggatcacgaggtcaggagtttgaggccagcctgaccaacatggtgaaaacctgtctctactaaaaatacaaaaattagccgggcctggtggcgcacgcctgtaatcccaactactcgggaggctgagacaggagaatcgcttgaacccaggaggcggaggttgcaggagccaagattgcaccattgcactacagcctgggcaacagagtgagactctgtctcaaaaaaaaaaaaagtaaaaatcacatgatcatctcaatagatgcagaaaaagcattcgacaaaatccagcatccctttatgattaaaactctcagcaaaatcagcattcaaaggacataccttaatgtaataaactccatctatgacaaaccaacagcaaacgtgatactgaatggggaaaagttgaaagcattccctctgggaactggaacaagacaagaatgcccgctgtcaccactcctgttcaacatagtactggaagtcctagccagagcaatcagacaagagaaagaaataaagggcatccaaatcagtaaacaggaagtcaaactgtcactgtttgctgatgatacaatcgtttaccttgaaaaccctaaggactcctccagaaagctcctagaactgataaaagaattcagcaaagtttctggatacaagattaatatacaaaatcagtagctcttctatacaacaacagcaaccaagtggagaatcagatcaagaactcaaccccttttataatagctgcaaaaaaaaaaaaaaatacttaggaatatacctaaccaaggagttgaaagacctctacaaggaaaactacaaaacactgctgaaagaaatcatagatgacgcaaacaaacggaaacacatcccatgctcatgaatgggtagaatcaatattgtgaaaatgaccatactgccaaaagcaatctacaaattcaatgtagtccccatcaaaataccaccatcattcttcacaaaattagaaaaaacaattctaaaattcatatggaaccaagaaagagcccacacagccaaagcagactaagcaaaaagaacaaatctagaggaagcacactacctgatttcaaactataatataaggccatagtcaccaaaacagcatgatactggtataaaaataggcatacagatcaatggaactgaatagagaacccagaaataaatgcaaatacttacagccaactgattttcaacaaagcaaacaaaaacataaagtggggaaaggacacccttttcaacaaatggtgctgggataattggctagccacatgtaggagaatgaaactggatcctcatctctcaccttatacaaaaatcaactcaagatggattaagtacttaaacctaagtcgtgaaactataaaaattttagaagataacattggaaaaacccttctagacattggcgtaggcaaagatttcattaccaagaacccaaaagcaaatgcaataaaaacaaagagaaatagctgggacctaattaaactaaagagctttttcacagcaaaagaaacagtcagcagaataaacagacaacccacagagtgggagaaaatcttcacaatctatacatctaacaaaggactaatatccagaatctacaacaaactcaaatcagtaagaaaaaaacaatcccataaaaaagtgggctaaggacatgaatggacaattctcaaaagaacatatacaaatggccaacaaacatgaaaaaatgctcaacatcactaatgatcagggaaatacaaatcaaaaccacaatgcgataccaccttactcctgcaagaatggccataataaaaaaaatcaaacagtagatgtgggcgtggatgtggtgaacagggaacacttctacactgctggtgggaatgtaaactcatacagccactatggaaaacagtgtggagattccttaaagaactaaaagtagaactaccatttgatccagcaaccccactattgggtgtctacacagaagaaaagaagtcattactcaaaaaagatacttgtacatgcatttttatagtggagcaattcacaattgcaaaatcatggaaccaacccaaatgcccatcatcaacaagtggataaagaaactgktgtgtgtgtgtgtgtgtgtgtgtgtgtatacacatatatacatacacatatacacacacatacatgtatatatgtgtatatatgtgtttatgtgtatatacacgtatatatatacacacacatacatacatacacagtggagtactatgcagccataaaaaggagtgaattaatagcatttgtagtgatctggatgagattagagactattattctacgtgaagtaactcaggaatggaaaccaaacatcgtatgttctcactgatatgtaggagctaagctatgaggacacaaaggtataagaatgatacagaggactttggggacttggggggaagagtgggaagggggtgagggataaaagagtactaatatggtgcagtgtatacccatatttgatgggtgcaccaaaatctcccaaatcatcactaaagaacttactcatgtgccgggcacggtggctcatgcctgtaatcccagaactttcggaggctgaggcgggtggatcacgaggtcaggagatcgagaccatcctggctaacatggtgaaaccccatctctactaaaaatacaaaaaattagccgggcgaggtgacgggcgcctgtagtcccagctatgggggaggctgaggcaggagaatggcatgaaccccggggagcggagcctgcagtgagccgagattgcaccactgcactccagcctgggcaacagcgagactccgtctcaaaaaaaaaaaaaaaaagaacttactcatgtaaccaaataccacctgtacccaataacgtatggaaaaattaattaattaattaaaataaaatagcaatatctggcgttgccaaggttgcaaggaaatgggcactggtatacactgctgagcatgcacacattagcacaacctctcctcagggcagcttgacactatgcattgaaagagttaaatgtgaactgtaattcactctctggaaattcatcctaaaaagataattaaggatgagtacaaaaatttaatcataaggatgctcactgcagtgcaattttttattacaaataaaagtgggaaataatctaaatcaccaaacagaggagtgttaaataaactatgtgcaccaaaaaaaaaaaaaaaaaatcatatggaacctaaaaagagtccaaaaggccaaggaaatcctaaggagaaaaaaagaaaaacaaaaagctggaggcatcattgctacccaacttcaaactatactacagaactacagtaaccaaaacagcatggtacctgtacaaaaacagacacatggaccaatggaacagaatagagaatgcagaaataagactgcacacctacaactatctgatcttcaaaaaacctgacaaaaacaagcaacggagaaatgcatccctattcaataaatggtgctgggataagtagctagctatatgtagaaaattgaaactggaccccttcattagatcatatacaaaaattaactcgagatggattaaagacttaaatgtaaaacccaaaactataaaaaccctagaagaaaacytagataataccattcaggacacaggcatgggcacagatttcatgatgaagatgccaaaagtaactgcaacaaaagcaaaattgactaatgggatccaattaaactaaactaaagagcttctgcacagcaaaagaaactatcaacagagtaaacagataacctgcagaatgggagaaaatgtttgcaaactatgcatctgacaaatgtccaacatctataaggaacttaatatacaagaagaaaaaaaatctattaaaagtgggcagcagacacaagcagatacttttcaagagaatcatacatacaaacaacaatcatgaaaaaatgctcaacatctttgatcatcagagaaatgcaaatcaaaaccacaatgagataccacctcacactagtcagagtgactattaaaaagtaaacaacaacaacaacaacaacaacagatgatggcaagtttgtggagaaatgggaatgcttatacattgttggtgggtgtgtaagttagttcaaccactgtggaagagagtgcagtgattcctcaacgtcctacagccagaaatgccatttgacccagcaatcccattactgagtatacactcaaagaaatatagatcattctgttataaagacatgcatgcatatgttcattgcagcactagtcacaatagcaaagacatggagtcaacctaaatgcccatcaataatagacaggataaagaaaatgtggtacatatataccatggaatactatacagccatgaaaaagaacaagatcatgtcccattcagggacatggatggagctggaagccatatccttagcaaactaatacaggaacagaaaatcaaattttgcatgttctcacttacaagtgggagctaaatgatgagaacacatggacacatagagggaaacaacagaccatgaggcctattggagggtactggagggtggagggtgggagaagggagaggatcagtaaaaataactaatgggtactaggcttaatacctggatgatgaaataatatgcacaaaaaacctcaaatccccactacacaagtttacctatgttacaaacctacacatgtattcctgaaccgaaaagttaaaaaaaagaatatttgtttatactcctttccctcccccgtaaaatgcacccatcttaagtgttctattatgtgtctgtatataatagataatacattatatattttattatacccatattataatagattgtctctttctcttcctctctctcactctctccatcaatccctgcagggcttttttcccaaataattttcttaaatttcatattctgctcagacctgaagttagtttacaattaaagtaagcaatgaactatttttaaaatcactacttattttaaccattacctagctctaggcttcatgagattataaactttaattctmagaaaactgtttgggtaaaagtcctctggggaatatatatakagagagagagagtaattcaagtataaagttctctgacactttgaattagtttactaaacctttggtactrcaatggctacatctttaatagaatacattactgcctgttcacttctcaagaaaaagtatgtccctcagatttccttgttcagtgcagtggctcacacctgtaatcctagcactttgggaggccaaggtggaaggattacttaaggcctggagtttgaaccagcctgggcaacatagcaggaccccatctctaaaaaaaaattttttttaattagccagacacggtacacgtgcctgtagtcccagctactcagaaggctgaggcaggagcattgcctgagcccaggagttagaggctgcagtaggccataatcacacctctgcactccagcctggatgacagagtgagaccctgtctcaaaacaaacaaacaaaaaaacttaatttccttgttcatattctcttttgtggaaaaacataaagagaggattatgttgccataattatgagaattttattaacttgaaataataacatttggctgggcacagtggcacatgcctataatcctaacgctgggaggctgaggtggatggatcacctgaggttaggagttcaagatcagcctggccaacatggtgaaacgctgtctctcctaaaaatgcaaaaattagctgggcgtggtgacgcatgcctgtaatcccagctcctcggaaggctgaggcaggagaatcgcttgaatccgggaggccgaggtggcagtgagccaagatcgcgccactgcactccagcctggacaacagagcaagactgcatctcaaaataaaagaaataatgacatttgaagaacaattatattagcctttgtgaaaacaaaaatatgttctgacagtgcttggctaattcctccttaaagtttatgaacacgttcactgagatcttaaaaacatcacgtgccctgaatttagtagactattctctgatggatgtggtccattttaagatttttgcacactttatccagagctttttgttttcttttatttgagacagggtctggctctgttgcccaggctggagtgcagtggygcgatctcagctcactgcaacttctacctcatggctttaagtgatcctcccacctgagcctcccaggtagctagcactacaggcccgtgccaccacacctggctaatttttgtattttttgtagagacagggtttcaccttgttgcccaggctagtctcaacctcctgagttcaagcaatccacctgcattggcctcccaaagtgctggggttacaggtgtgagccacagcgccccccaatcttgagctttgaaaaacacatttaaatggaccttaactgagatacacagcaatttccctatactcagccacaatgaagaaaaaataaggaaattcataattttttaaatacatacttcaaagatggacacaatattgacttaatcagaagccatcagaggtcactaataaatgaagcaatttgcatatgtgaattttacaagtttcatatttgataccaagaacaaaatgttctcagaatttcatattaaaaacaccagtgttcaaagtgctcatagtataagccaagtatctaaaacctttgaaaacacagcattctatgaaaacaatatgtgtacatgtatgtgtatgtctgtgtgggtgtttgtgtatgcatatatataaatttactaaatacttttctggcattctgtgaaacttagccagaatttaatttttatttcctttatttacatgccragtgggtattattratcataattgtgatctattatattggagcaggaaaggatatgagttaaatcatagaaataaaatgtgaattttggaggaaaaataaaataaaactgggaaagagagatactacagagaaattacattctataaccacagaagtggggtgggcaaaataacaaggatttgaccaggtgggattagaatttcactaaagttctcacactgcatatattattcagggttgtattgacaatggagtccccttcccatgcagtaaggaaaccacatacaaccagaggaaacaacgattagaaaacccctaggaagaatgacatcagcaaaatgtgactaagaagcttcagaccctcattctccttaataaacattaaagaaacaactatacagtgactaaataactttataggaactctggaaaacagtcaaaggtctacagaaaccaagtaaacaatcaagaacaagctacatcccgaacagtaggacatgtcatggcatttttgctcacccttgttccactcctccccagccgttgtcttggtttggaggagatggcagttcctaattccacctgtattagtccattctcatgctgctatggataaatatctaagactgggtaatttataaaggaaagargtttagttgactcacagttctgcatagctgaggagacctcaggaaccttataatcatggcaaaaggcaaaggagaagcagacaggacagagtgaatgccagcaggagaaatgccagacgcttataaaaccatcaaatcttgtgagaactcttcactatcataagaacggcatggggaaaactgcccccatgattcagttacctccacctggtcccacccttgacaygtgggaattattacaattcaaggtgagatttgggtggggacacacagccaaatcatatcaccatcccttgaaccaaaacgaacaaggctgaccttatttgcaacattctaacttgtctaaaggctgcctgaagaattgatccctgattcacctaactcagatctctgctaggagacaagcatggccttaatctcagatgaggagaagcagtagtcatggctcagaaagctgcagagagaccctacagattcctggggcaaaagattataggtggagacatatgacagaccatcaagaccccacaaagatctcttgggaaatttaagacaattaaaagcagccatctatacagagattcaaaaaaccacaaacaggtccaggcaagatgcatgctcagtaaagacctgagaagacctttagctttctctttgatgtgatctcaaaattcagaagcaaggccaagataattaggaaaggacttccatggcaaagagccagtctacagagaatgggagaagtagctgtttttctttttgttttcaaatccccaacataactattgtgaatttaaaatcccaaaatcacaatgcataaaaagaaacggaaacatggaccattcaataataataataaattggcagaaactatccctgaaaaaatacaggtatcagacttactagaaaaagattttcaaacaatgttttaaatatgttcaaacagtaaagaacaacatggacagagacctaaaggaaatcaggtaaattatatgaacaaaggggaatttcaacagagatagacattattaaaagaaccaaccaraaattctggaaatgaaaaatataatgggcacactggggatagtcaaacttaaaaattcactagagggattcaatagcagacttggacagaagaaagaataaacaagcttaaagataacttatttgaaattatctagtatgaggtacaaaaagaacaaaagaataaaaaagtgaacagagcttaagagacactatcaagcaggacaatatatccattatgaagatcccagaaggagaagacaataagaaaaaggtagggaacttatttgaaatataatggccaaaaacttacccaatctgaggatagaaatagacatataaactcaagaagttcaacaaattctaagtataataaacccaaagagacatacaacaagacacattacaatcaaactgctgaaagtcaaagacaaagagataatcttgagagctacaagagaaaaatgactcatcacatacaagggagcctaataagattatcagcaaagttctcagtatgaatcttgcaggctaaaaaggaatgggaaagtatattcaaaaacatcaactgggccgggtgtgatggctcacacttgtaatcctagcactttgggaggccgaggcaggcagaccacttgagatcaggagttcaagaccagcctggccaacatgttgaaaccccatctctactaaaaatacaaaatattagccaggcatggtggcacacgcctgtaatcccagctactcaggaggctaagacaggagaatagcggaacctgggaggtggaggttgcagtgagctgagatcgcaccactgtactccaacctgggagacagagcgagaccccatctcaaaaaaaaaaaaaaaaaaaagaatactgtatctagcaaaactgtccttcaaatgtgaagaaatgatgacattcccagataaaagatgtatagtcaacaccactagatgttccctacaagaaatgctaaagagggtccttcaaattgaagcaaaaagatactagacagctatacaaagtcacatgaaagtataatgttctccattaaaggtaaacatatgggcaactatagaatcctgtgttattgtaattctggtgcacaaatccacttttaattcttgtatagaatctataaaattactcacacaaaaaatctataaatctaagttaataagtacacaatatataaatgtaagttttaacaataaaaaaaggaggaactgtaaaggagaatttttgtatgctaatgaagattagttgttatcagtgtaacataaattgcataaatttgaaatgtgttacgtaatcacaatgctagccaccaagaaaaatatctatatagtgcacacaaaaggaaatgaaaagggaatcaaagtatgtcactataaaaaaaaatcaatggattacaaagggagggcagtaagaaaagaaatgaggaaccaaaaagccacaagacatacagaaaacaggtgacaaaccagcaatagtaaatccttccatatcaataattactttaaatatgaataatccaactactagtcaaaagacatattgactgaatggattttttwaaaaactctaacactctgctgcacacaagagactcattttagattcaacacataagctgaaatggaaaggatggaaaaaatatttcatgtaactagttaccacaggagagcaggggtacctataatggtatcagataaaatagactttcaatgaaaaatcatcacaagagactaggaaggataatacatgattaaagagtcaattcaccaagatataattattataaatatgtatgtaccaaacatcagaactcttaaatatatgaagcaaacattaacataattgaagaaagaaatagacagcaatgcagtaatattaggagacttcaataacctgctttcaataatcgataggacaaccagacagaagatcaataaggacarcagaagacttgaaaaacactacagaccaactggatggaacagacacatacagaactctccactcaattcctatcaaaatctcaatatatctttgcagaaatagaaaaaaaaaatactcatccttaaattaatatggaaaatcaagggaccttgaaaagccaaaacaatcttgaaaacaaacaataaagttgaagaactcacactttctgacttcaaaatttactacaaagctacagtaatcaaaatatggtgctagcataaagacagacatatagaaccatggaacagaatcgagaacctaaataaaacctttgtgtatgtggataaatgatttctgacaagggtgccaagaccatttaatgggggaaaagacagtcttttcatcaaatattgctgggaaaacaggatgtccatatgcaaaagtatgaagttagactcttaccttacaccatatacaaaaatcaactcaaaatgtatcaaagatctatacacaggcctaaaactataattctcttggagaaaacgtaggagaaaatgtagcattgaatttggcaacgatttcacaggtaagacaccaaaagtacaggcaataaaaacaacaacaaaaaaacagataaactagacttcactaaaattattgtttgtccatcaaaggatactatcaacagagtaaaaaggcaacccacacaacaggagaaaatacagttggccctctgtatccatgagttcctcatctgtggattccaccaacaagagattgaaaacattgggaaaaaaaccatctgtcctaaacatgtacagactttttttcttgtaaattattccctaaataatacagtataacaatgatttacataataattacattgtattaggtattataagtaatgcagagattatttaaaatatatgtgaggatatgtatagattatatgcagatactacgcatttaatatcagggacacaagcatctgcagattttagtatctctagggggtcctggaatcaatccccacaaatactgagcgacaactgtatttgcaaatcacatatataataagtgacaaataaccagaatatagaagaactacaacccaataaaaaaatgtaatgtgcaaagaacttccaagatatacaaatggacaaaaagtacatgaaatgatgttcaacatcactaattgttagaaaaatgcagatcaaaccacaacgagaaactacatacattggaatggctattatttgattttagccaaaaggctgagaagcaataagatggccattatcaaaaaacagaaagcaaaaagtgttgataaggatgtggagaaactagaacaattgtacattgccagtgggaatataaaatggtgttgcccctgtggaaaacagtatggtagttcctcaaaaaattaaacataaaaccattatatgatccagcaattttacttctggtatacaccccaaagaattgaaagcaaggacaagaacagatattttcacacctgtgttcatagcaacattagtcacaatacccaaaaggtggaaacaaccaaaatggccactgacagattaatgaataaacaaaaggtggtatatacatataatgaaatattattcagccctaaaaagggaatgaagttctgatacctgctacagcatggatgaactttgcagacattacgctaagtgaaatgaggctcaaaaggacaaatattgcattactccacttatatgaagtacctggaatagtcaaattcttagagacacaaagtagaacaccgtgcacagtggctcacgcctgtaatcccagcactttcagaggccaaggtgggtggatcacctgaggtcaggagttcaagaccagcctgaccaacacggagaaaccccatctctaataaaaatacaaaattagcagggcatggtggcacatgcctgtaatcccagctactcgagaggttgaggcaggagaatcgcttgaacccaggaggcggaggttgtggtgagtcaagattgcgccactgcactccggcctgggcaacaagagcaaaattccatctcaaataagtagaacagtggttatcagaggcttaaggaagtatgaaatgggaaattgttatttattgagtacagaatttcagttgaatgattaaaaagttctggagatggagagcggtgatggttacatgatgatgtgaatgtgcctaatcccactaaagtatacacttaaaaataaagtggtaaattttatgttaaatatattttaccacaataaaaaataaaggaaagggaaaggaaagaaatgaaaccactagtgatctagttacctcttgggaacattctggaaaaaatttgtggtaaagacagaaacggaaggaaaaagttttaattatcttttaaactttaataggtaaatttagaggttatcttggggctacatgtttgagtgagtttctaggtatggggcaaacctcttgtttcctcccactgactttgctcatagtcaagggtaataaatcatgtagttacctatctacattgtcttgtttgtactattcattggcatactgtctgaaagaaatcttatatttatttattaattttttttgaggtggagtatcattctgtcacccaggctggagtgcagaggtgtgatctcagctcactgcaacctccgcctcccgggttcaagtgattctcctgcctcagcctccagagtagctgggattacagaagcacgctaccacacccggctaatttgtttatttttagaagagacagggtttcaccatgttggccaggctggtcttgaacttctgacctgaagtgatccagccgccttgacctcccaagtgctgggattacagtcgtgagccaccatgccaggccacagaaatcttgtatttagaaatggcagaaacccattcttttaatgtggaattatggtagatatagcaacctgctgcacttcctgtttttactatcacccaaagaggggagtaatacatatagaatagggagtgtgtgcatatatatatgtgtgtgtgtgcgtatatatatatatatatatatatatatatatgcacatacacatacacggtatttacatgttgacaattacattaatagagcatcttgaagtataagtgtataacctctaaaaatgataaagtagcaatttttgtgtttgctactacttctatcataagtttatcaatttacttgatggaatacagtatcttcaagtattggttgagatggagtaattgataaactattctcattctttcctctaaaaattgatttttaaaaaatattttcaggccgggtgcggtggctcacgcttgtaatcccagcactttgggaggccgaggcgggcagatcacgaggtcaggagatcaagaccatcctggccaacatggtgaaaccccgtctctactaaaaatacaaaaaaaattagctgggtatggcggctcatgcctgtagtctcagctactcgggaggctgaggcaggagaattgcttgaaccttggaggcggagactgcagtgagccaagattgtgctactgcactccagtctagtgacagagcgagactccatctcaaaaaaaaaaaaaaaaaagttaaatatgtcaacatactttatctcagcatttatgatctatttactttctgaaagatttggggcatttcactaaagtattttatatatcatatctaaaataaattatatacacagcaaaagtcaattaaaagttgcaggccaggcatggtgacttacgcctgtaatcctagtgatttgggaggctaaggcaaaaagttcgctagagcccagtagtttgagactagcttaggcaacatagcaagaccttgtctctacaaaaataaaagtttaaaaaaattatccaggcacagtggtgcacacctgtagtcccagctacttgggaggctgaggcaagatcacctgagcccgaaagtttgagctgtacttttgctgtgagctataattgtgccactgttctccagcctgggcaacagagcacaaccctatctcaaaaaaaaaaaaaaaaaaaaaaacacaaaacaagttgcacagttatgtgatgttgaatatcgggctgttttatacaagttaaaactgtgtttagctctgaatttgggaaggcaaaggcaaaaaagtgaaataggtttactttgagaagcatcatggtataacagaaagaatgcagtattataagcaaactgtctcagtctaattttgttccactacctcctcactgctacacacctctatacctgtttcttcatctgtaaaatgagaatggttatgtttaatttagtaatattacatgattaatctgtcaaattaggtaatggaaaaccattctgttctaaaacatggttcatgattattgtttttattaattttttaacacatgcaaatagtaaatttatctagatggaaacactttttcagcattctatattcacactcaagaatgtttgtgcagcccaggtgcattggcttacacctgtaatcccagcactttgggaggtcaaggcaggcggatcacttgaggccaggagttcaagaccagcctggccaaaatggtgaaaccctgtctctacaaaaaatacaaaaatagcctggtgtggtggtgcatgcctgtagtcccagctacttgggaggctagggtgggaaaatcacctgagcctcggaggtcaaggctgcattgagccttgattgtaccactacactccagcctgggtgacagagtgagaccttatctcaaaaaaaaaaaaaaaagcttgtgtaaaaaaaaactgaaaagcagccyggcgaggtggctcacgcctgtaatcccagcactttgggaggccaaggtggggagattgcctgaggtcaagagttcaagaccagcccggccaacacgggaaaaccccatctctactaaaaatacaaaaaaattagccagatgtggtgacgtgcgcctgtagtctcagctactcagaaggctgaggcagggagaactgcttgaacccgggaagcggaggttgcagtgagccgagatcacgccactgcactccagcctgggcaacagagcaagacaccgtcttattaaaaaacaaaacaaaaaaaactgaaaagcaagctgggtgtggtagtgtatccctacagtcccagctcctttggaggctgaggtaggggaagtgcttgagcccaggagttttaggccagcatggagaacctagcaagacccaatctctaaatttttaactgaaaaacaaactaaacatgtcttagagttttgaaaaggatagacattctagtcacatagatgtttcttattataactcctctttataaggtaaaatacttaaatcataattcactaaaggcattcctgtggaaaggtgaaatgacaagttctaagtacactcctttctgatggcttacttaacacagaagttagaaagttagttagcttatctataaaacttgtctctcgtatgtaccagaagcctcaagccaacctttggcaagtgctagactacagtcagtttgagactgcattttctacaaaaaatgtcaagtaccaaactctgccatgttgatgaaaaagaaacctatatatgataccaaatatgcaagaagcagagttcaatttcacaatgttcagtagtgaaacttgaatagctggtcaacttactcagaaaagcgtctcctgccacatagggtggaccactagctagcatgcttataagcaaaagccttaaatgagaggaatagggaatcagagaagttaatcataaagcagcctgtggaacaagtattgttagtacattaaaaaactatagtggaaaaaaaaaaaccctttacagagaaatacgaacaaaattataatcccaactctgccactaactgactttggacaaaacacttaacccatatgagcctcaacttgttcatctataaaataaaacaatttcagattagggagttttaagatttcttccatgtctaaaatattatacttctgggatttaattattattaaaccaaatcagaaacttcaagacagactgttagtaacacagaggaaacctaacataataaactgagatgatcacttactgtattaaaatttaaaaatctgcattaagtgagccacaggtcaaaatccagtttatagcaaagcaaagcttaacttgtctgctgaatttacttacaaaagtctgtgtacatttaaaggaaagtgacctgatatcacccaatattaggtaacagcaaaagggtgtggctcagaaaatgcacttaaccacatgtagaaagcaatgagggactggggaaaaccctttcgttgctgtaaaattactacaagaattaacacgtagtttcattcagtcaaggctgagcacaatttcaacacattaaaaaaaaaaatgaagatcagtcttccttggaaccacaacttcctattattgaacaaaatcacctcctcccaaactaggaaacaaacaaagcaaaactaccaattctacagtgtttatccagaagcttaaaatttcatagcttttggtccaataattctatttctacagttctataccaaggaaataatcctacaaacagaaaaaaaaaaaaaaacttcatgcctatctatcatagggttatttatgaaaaagaagaaattggaaacaatataaatttaaccaaaaaaggagtggttaaataaagctatagtatttaatggaataataaaattcagccattaaaaacagactatgtaggaacattaaaaagttttgaagtgttataaggccaaaaaaaaaaagaaaagaaaagatacagaattatatatatatatacacaatataattcaagctgtgtttaaaataaataaataaaacgtggagaaaaagagactagaagcaaattcatgttaactttagttttgtataactagtaggactatgggtaaattttcatagtttcctgttttccaaattttatttaatgattatgttttacttcaaataatgtttaaaaacttgaatgtaaaataaattattttataaatcttcaaaatatccgtctaaggtacgtagagtataagtcaaggttatatagcaatggaaaccttggaaatgccctgaagtctttttaaaatgcaatggattttaaagaaaatcccccaaaggaatattttttgttttgtttttttaaatcctggaagatcttgagaagttaattctatgattcttactttttaaaatgtaattcctaaggtaagagaggattaaatcatggatagaagacactacataacaacagcaacatggctgaacgacacgatagttcttaggtatgccatcagccttctagcaacaagtatatctagatattaagaaaataaaataatttacctaggatctctgccagttgatgaacaaggccaaaacctaactcattttctcaatgaccattctcgtggtatagaaactagactttggtatggtagtttataagccaagagttgaagcttatgttttaaaaaatgacagtgcttagttttctttttaaattgaaagctacctaaaagcctggaacttgccagcacacactcaagcctcaggcactattaaattacgcattcttcttgctacctgtttttccaggtttttttttttttttcaattttgtgtacatcaaggtctacaggcacatacctacatacatgtgttgcccttattttttagccgcatatctgtttcctttgatatgtgactacttaaaatagtataaatgcagactttctgaaaggcttttcttagtaaaaataacttttaagatataacttacagaataactttaaatttattttttaaaattactttcacctatactttaagtaaaatgtctccaattatgacatgatagtgtaagtgctgttatccctactctctttaccttttacttttaccatttcaactctaagtaggttatcttcaaattttaaaaactgtccccactgtattatttttcacataatatcactcatctttagtcttatcttcacacatcatccaacttcagaagcccataagatcttctgtttttctgtaactgacagggatgggcagaaggtgcaaaagaaagaataacaaatgggaaatagatgaagttgttaatatttctttgcagcttcataaaatgttatgaaagtcttataaaaccacaatcttttctattttataaactattatctcaatagccattatcaaatactcagtaaaacaccaaaattaggaaatatatgctatataataccttttagaacacacagtattttaaaatcacactgtagaatccaaatgatgacccacagtttgcaatttttcattggaggaaccctcagatgcttctaaatttcaattaacatcctgtcctttctttgccttttaatgcttattatttcttgactagtttttataaatatcgtatcaaaattttgatgaccaagtcaggtaagtatacagttatcttatgtatctatgtgcagtacattttaaactattttattttgtttcactatttttcagtacttaaaaataataaagatacaaatgttaagtcaattactttttactctgcttaaacattatttttatttgtttatttgcaggaaatcagagatggtggttctctcaaaatgattcactttggtctggtgtaaacattaagaaaaaaagaaaactgccttcttyatatctaaacttttcatggcctgatacagacttaaaatcccccgtgtggatttttaacaagagacagtatgaatcatataaattagttaagagttttgagttgagtgtttgttttcaaaataaagttttattatttcaaaaacatgcagcataacagcaaagtgatcgtaagtaaaagtcttcaacctacttattttcaataatgtaaaattttgaaagtgtcttaaattgtatgttaattaggtgctacaaaaatagaatatttaaactttgttctcccaggtactttaaaaaaggggcagtagggggcaggcatagtgctcatgcctgtagtcccagtgctttaggaggccaaggctgaaggatcacttgagcccaggagttcaagactagcctgtgcaacatagtgaaacgctgtctctagaaaaaattttaaaaattagccaggcatggtggtacatgcttgtgaagctgaggcagaagaattgcttgagcccaggagttcaaggctacagtgagctgtgatcgcgccactgcactctaacctgggcaacagagagtgaccctgtctccaaaaaaaaaaaaaaaaaaagaaagaaaagaaagaaagaaagtcctcttctgctcttgtttacattattaatttacattacaaatacagtatttattatgcaaatttttcagcccagatccattgttagaagacaattctccatggttctctcgaattactgctatgagtaatttgccctgactgccccttagaacacagatactgtttccctctggagaaaggggcaggcatgcttatcaacttttatatgagatttgagttctttaaactcagaatgcctctcctttacactgcccattgagtgtgcaggtgtcatctagccctcttaacattgctctataggaatagggctcagagaatccatgaagaaaagaaaaaaatgccgataccctggttactatcatttgtctctgactcaggagtctcatgtcttctaacagcatccatgaaactatagtgtggtaacttgttagctagtaagtagggtaaaatctcatacccttcacagttattgacacccattctttagcagataactgatatttcacaattatagacatctataggcccggcacggtggctcacgcctgtaatcccagcactttgggaggccaaggcgggcgaatcacgaggtcaggagatggagaccatcctagacaacatggtgaaaccccgtctctactaaaaatacaaaaaaaaaaaaaattagccgggcgtggtggcgtgcacctgtagtcccaactacttgggaggctgaagcaggagaatggcgtgaacccggagggcggaggttgcagtgagctgaggtcgcaccattacgctccagcctgggtgacaaagtaagactccgttgcaaaaaaaaaaaaaaaaaaattatagacatctataataataatcaacattgtttaatattagacaataattacattatataattaaatcttagagttcaaagttaatcagactgaaggcttttatacttcaaatttttctttctacttcctatttatctgtacctctaccagagggtatgacaaaaaaaggtgaaactcaaattagatttttcattttgttattgctctgaaaaaattttaataatgcataacatgtaagccaaactgagttaccagcaaattttcattctcctattcccaaccttctttatcacacagataatcaaaagttaactaatttttagagaaaaaattgtatttaaaaaaatagggttttgtcaagattgcagaattttctccagattttccgggtaaatagtcattaacccaaaatacctttcctgtgagatactaaagataaaatatggatattgatacatctatgtttttctacataatgataataataatgaaaatgtttgccagttatgtaggtgaaaattaaacaaatcatagttcttaaagtacccattttccccacttcacatacctctagaaaagttaaatgtacagaaaaccaagtttagatagtaagaatatattatgaatgatctttgataatgtccatgatttataaatgctgttatttcccagatgttgtaaatctgagaatattaattaaattgatattcctcctctgctagaacctgaaaggattatgaaggggctaccatagctctaaagtaagaagagtggtataggcaggaacagctaggtagtatctgtcctagcactgacaggttcacaggttgtcctttaggaatagacccatgagctttttcaactattttccagatttctcagatctgaggtaatttccacagtaatttatattagctgtcacattgtgtcttattgctagaataaactttgcttgtaatgctaatgtctaaaagtttttgcttcattaaaaggctgtgtaaccaaaacttggtattatactttcttcttagtatcttgaaatgtttgttaaggagttataattataccactctctactgagagtttgatcagtgctacaacacacatagccctgtacctacatagggattctcaatgaaactcagtgaggaagatacatcatcatcatcatccctactctatcgatgaagaaacctgatgagccttctagcaccaggtgtcacctagaaaggacagaggggcctggcctcccctcccacaatgtgccaagtggagtttgagctggcccacactgccctcaagcagctgaagggtactgtgtgcgatcaggagaaaactgctggtgtacagcttctgcaaacagcccacccagagcgactgcaacatccctgccccttcagcctcagatgtgaaagccaaggccaagtaggaggcatggaatgtgaacaaagggatgtctaagatggacaccatgaggatctatgttgccaaagtagaaaagctgaagaagaatgaggctggctaaggacacattagcaaacacaaggaaagcagcatggctcctctggtacagaatgctcttccttaaaaaccttgatggctgaaatgtcctgaaaccaaagcaagtttagctgagacatcaataaatcacttaaactgcatgagagtgactgtctgctgctggaaaagagaaacacagtgactgtgagtgctcgggaggtgtccaaatgtacaaactggttttttgtatggttttgagtggagttcccagctttcctattataagagttaggtaggcatttggcaggagtagaggggttagggggaaaatgtgctatggaaatgcccaagggctgaggtcagtgagaccattctccagtgacagcctcttgggaggctgaggctccaaccctttacctcttcagggttgattcactaataacccagcactataaggggaaagggactctgtcctccaaaaagctgaagtcaagtccaaaaggccccattggcacacaggccctaagaagttaatgtttttagggagaccaagtttttagtgataatgtggtgaaacaattgatgcagcacaatacagcagatgagaaacaatggagcacatagtgtcaaaataccagcctcagaaagacgcatctatggcctagcaaccaaaattttcttgaggttattctgcccctaactctggtttctgcttggggatgtttgtggaacaatatgcatatgtatgtatatgtgggatttgttacaagaacacaacatacccctcgacctatgcaagagccagagtgtctaagcccaacttctactcctcactgttagttatcgtggaggcatcattgcacaaccaatatgcctggtggctggagtatagactgctaaatggtattcagcgaagcaggtctatagtgacatgagatttcctggtacttcttccttaattaaaaattatattcatagatcatgacatcaggtcagttccagttcttgctgggaacaataatagaaacaacaaccgtaaagacttcagagaacagaccgggcgtggtggcttatgcctgtaatcctagcactttgggaggccaaggtggatggatcacgaggtcaggagattgagaccatcctggctaacatggtgaaaccccgtctctactaaaaatgcaaaaaaaaaaaattagctgggcctggtggcacgtgcctgtactcccagctacttgggaggctggggcaggagaatcgcttgaagccagaaggcagaggttgcagtaagccgagatcatgccactggcctccagcctgggcgacaaagtgagactccatctccaaaaaaaaaaaaaaaaaaaagacttcagagaacaaaggcaaccaaacctcaccatgtatcttcaagatattctgttcacatatacatatttgcagggagttaatatagacaaagtacattacttaagaatgaagcctacccagggcatcacaacaactaaagaactatttcttgtaactatagactgggcaagagccacagtgtagaacagcagtgctgttctgtcttccttgtaggatgttatgaagacattttgatgcttttaggatcatgattcatgttaaatgtaaatagtagaaataataatacattttgctccaaaatatggtaacaacttacaagctgtaatacatagccataccactcttcaaatcatagaacctaaaaagtaaaaatgtgctgtaattaggacagtaaaaagtaactgtaagatagattaagtttaaaaaaggagaaacaataggatttatatatgtgtatttccttatgacgtcgttacctataggatgcaggggaaatgggactgatgcagatggggtaggagcaagatttttctatggttactgtgaaaagaaaagaaaatctcaggactcactaatgaaaaaaattataccattctggcatattaactatttaagttaatagagcacttgaaaagcagcaggtgaaaaaaagatcgctatgacattcatgctggttcctaaggcaagaaatgaaattcctatataaaagatgcaacattcttaccatggaggacaaaaagctgaggccaaaggaattgtgtacaaacaaacctagttacaccaacgcttatcttcctggctacttacctacacaattagctatcctagcctaatcccctttgccttatcacattttcccaacttactgttctttgtccaattcagtatttaagtaattgactctaacagcttcttcagttcttcatttctttatgaaggctcccatgccacataaaacttatattgaataaatgtgcatgcttttctcccgttaatctaacttatatcagtttagttattgggcccagtcaggaccctaagagaatgtaggtgaagtttcaccatctctacattagtaaagactatcaaatttacaactaagactttattttaaaacatactaattggccaggcatggtggctcacgcctgtaattccagcacattgggaggccgaggtgagcagatcacctgaggtcaggtgttcaagaacagcctggccaacatggcgaaaccccatttctactaaaaatacaaaaattagttgggcatgtggtgcgcacctgtagtcccaactactcatggaggctgaggcaggagaattgcttgaacccaggaggtggaggttgcagtgagccaagatcgcaccactgcactctaggctgggtgacagcatgagactctctatgaaaaaaagaaaaaaagaaacagaaagaaagaaaatactaattaattaattatattatttaaatatatatatatatatatacaaacagacatatagaccaattgaagaaatacagagccaagaaataaaccttagagtatatggtcaaattatttttgatgagggtgccaagaccattaaatggggagggaaagggcagtcttttcaacatatgctgctgctgggaaaactggatatccacatgcaaaagaatgaagttggacccttaccttatgccatatacaaaaataactcaaaagtgatcaaagacccaaacataagacctgaaaatataaaactattagaagaaaacacaaggaaagcttctttacatttgatttggtgatgatttcttggatataaagcccagcaacaaaagtaaaaaca

SEQ ID NO: 97661 - DNA, 34760 bp, Homo sapiens
gacttgttgaatggctttgcccaaaatgctgatagcgatatggacaataaatccaggccgaggtggttcagatggagatgaggaactccttgggaactggagcaaaggtgacttttgtgttttagcaaagaaactggtggcattttgcccctgcgttagagatttgtggaactttgaacttgtgagagaggatttagggtatctggctgaagaaacttctttttttttttttttttcgatagagtcttgctctgtcgcccaggctggagtgcagtggcacgatctcagctcactgcagcctccgcctcccaggttcaagcaattctcctgactcagcctcctgagtagctgggattacaggcacacaccaccatgcccggttaatttttgtattttttttagtagagacgggggtttcaccatgtgggctaggctggtcttgaactcctgacctcaagtgatccacttgccttggcctcccaaagtgctgggattacaggcgtgagccactgcacccggcctggctgaataaatttcttttttcctttttcttttttttttttgtgagacggagtctcactctattgcccaggctggagtgcagtggcgcgatctcggctcactgcaacctctgcctcctgggttcatgccattctcctgcctcagcctcccgagtagctgggactacaggcacccaccaccatgtccagctaatttttttgtatttttttagtagagacggggtttcactgtgtttgccaggaaggtctcgatctcctgacctcatgatctgcctgcctcagcctcccaaaatgctgggattacaggcgtgagccaccacgcccagccagctgaagaaatttctaagcagcaaagcattcaagaggtgacttgggtactgctaaagtcgttcagttttaaagggggaacagagcattaaacttcagaaaatttgcagcctgactacgatagaaaagaaaaacccattttctggggagaagttcaagccagctgcagaaatttgcataagtagcaaggagcctgatgataatcctcaagaccatggggaaaatgtcaccaggccatgtctgagacttttatagcagcccctcccatcacaggcccggaggcccaggaggaaaaagtggttttgtgggcaaggcccagggtccccatgctatgtgcagcctaggggcttggtccttttgtgcaagctgctccagccatggctgaaaggggccaatgtacaggtcaggctgtggctttagaggtggaagccccaagccttggcaccttccatgtggtgttgagcctgtgggtgcacagaagtcaagaattgaggtttgggaacctccacctagatttcagaagatgtatggaaacatctagatacccaggcaagtttcctcagggagaacctctgctagggtagtatggaagggaaatgtggggttggagccctcacggagtccctactggggtatcatctagtggagctgtgagaagagggtgaccatcctccagaccccagaatggtagattcacctaccattgcaccatgcacctggaaaagccacaggcactcaacaccagcctgtgaaagcagccaggagggaggctgtactgtaccctgcaaagccacaggggtggagctgtccaagaccatgggaacccacctcttgcatcagcgtgacctggatgcgagacatggagtgaaaggggatcattttaagatttgactgcgccactggattttggacttgcatggggcccacagcccctttgttttggacaatttctcccatttggaatggctatttacccaatgcctgtacccccattgtatctaagaagtaactaatttgcttttgattttacaggctcatgggggaagggacttgccttgtctcagatgggactttggagtgtggacttttgggttaaggctgaaataagactttgggggactgttgggaaggcatgactggtttgaaatgtgatgacatgagatttagaggggccaggggattggaatgatatggtttggctgtgtcctcacccaagtctcaccctgaactgtatttcccattattaccacgtgttgtgggagggacccagggggaggtaattgaaccatggaggctggttagatctgatgggtttatcaggggtttctgcttttgcttcttcctcatttttttttttttttttttgagacagatttttgcttgtcacccaggctggagtgtaatggtctgatcttggctcaccgcaacctctgcctcccaggttcaagcaattctcctgcctcagcctcccgagtagatgggattacaggcatgcaccactatgcctggctaatttttttgtactttttgtagaggcttcactatgttggtcaggctggtcttgaactcctgacctcaggtgatccactggccttggcctcccaaatcccaggctcacacctgggattacgggcatgagctactgtgcccagcccttcctcattcgctcttgctgctgccatgtaggaagtgccttttgccctccatcatgattataagaccttccccagtcacgtggaactgtaagtccaattaaacctctttcttttgtaaattgcccattgtcaggtatttctttgtcagcagtgtgctaatacagtgccctaggctgggagctgggtaggggtagggggatagccctgaagttacaggaagtcaacagatgcagctggtaaagaccttttggtttaaaatatctgcttctctggtttaaaatgtttatttctggccaggcacagtggctcacacttataataccagcactttaggaggctgaggtgggcggatcacccgaggtcaggagttcaagaccagactgaacaacatggcgaaagcttctctctactaaaaatacaaaacttagcccggcatggtgatgggcacctgtaatcccagctactcgggaggcagaggttgcagtgagctgagatcacaccattgcactccagcctggataacagagcaagactctatatcaaaaataaataaatacaatgaaatgtttatttctatttgtctctatcctcctgaaaaatggctttatgccaaggtaagtcattataaaaatggtttcttggttaactattagagatcctccagcttgctagtagaggtgtaactgcattaattttttttttttttttttttgggagatgggagtcttgctctgttgcccaggctagagtgcagtggcgtgatcttgcctcaccgccacctctgcctcccgggttcaagcgattctgcctcagtcttctgagtagctgggattacacatgtctgccaccatgcctggctaatttttttgtatttttagtagagatggggtttcaccatgttgtgaaatgtccaagctagtctcaaactcgtgacctcaggtgatccatctgccccggcctcccaaagcgctgggattacaggcatgagccaccatgctcggccaaaattttttacacctcttgtctattgcacatgcaaaattgccttttttgtttgtttgttttctgagatggagtcttgctctgtcacccaggctggagtgcagcagcgcaatctcggctcactgcaacctctacctcccaggttcaagcaattctcctgcctcagcctctttaatagctgggattacaggcacgcaccaccacgcccagctaatttttgtatttttagtagagacagggtttcaccatgttggccaggctggtcttgaactcttgacctcgtgatccacccgcctcggcctcccaaagtgctgggattacaggtgtgagccactgcacccagccaccttcttcttaatattatctagttctcagtaattttattctctatgagtagaatgcctaagtgtatgcccagccacgttatgagagaaatataaaacaattgacactttacttctattaaagcaatccccaacccacttcccaaacccccaccccaagcatcatatcagcaaaaaatgtgaggctataacacagctagctgtggtacaggttggtaatctaaaccctttatagtagactgctggctgcctacccaatatccactctcccctttcaaaatagaactccacttttgttaggagtagcaatgtgtccaggtacatcttccagcattctttacaattagggctggtcatatgtcataattctggccaatgagatatcgagttgaaggtttcttaaaatgctctgctcccagatataaatgacaagaaggggtggtgccatttccctccctggagtgtagatgtgaggcaagagataaaccatacttcataaacaaaaagatgaaaactgcatactcaaatgatgaaagagaaatctggatggagcccagaatatttaagacattgtaaagctgctgcaccatcctgaacttctcacaccagaattatatgagaaacaaaaacaattttagaaacctcagtttagccaagttttcaaatgcagtattaaatgatagactcttatggcttgcctacttttgggaaaaggaaacttttgatcaaaggaaaaaagtttgaaaagaaacattgcatacatgaagatatctgtgtagtatttttttatattaggttagcactgaaaacaaaactagatatccaacaatgaggaaatttttaagtacttaggactgcagttttatagtgagctttatgtgccaggcacagtggctcatgcttgtaatcccaacactttgggaggcaaaggtgggcggatcatttgaagtcaggagtttgaaaccagcctgaccaacatggtgaaacccggtctctactaaaaacacaaaaaaattagctgggtgcggtggtgcatgtctgtagtcccagctgctcaggaggctgaggtgggagaatcacttgaacctgggaggtggaggttgcgtgagccgagattgcgtcactgcactccagcctgggcaaccaagcgagactcgtctcaaaaacaaacaaaaataataataaagtgagctttatgaagacattacagaaaagattcaaatataaaatgacctctgctctaattataactggtggcaaaactgttggttgtctgatccatggtaattcccaatccccattttcctttcccaccttccattagtgagactggaaaggcgtacagcttcattttcccactttcctgggaacaaggggtgatcatgttgtacatttatggctagcagatgaacacaagtctgatctaaatttctagaaaagattttacatttatgagaaaaggatcagatgtggaaggccctgcttccccttctttttgtcttgaatacagacacattggcttgaactgcaatggccatcttgtttccatgacagaaaggctaaaggaatctgagcccctgatatcactgagtcactaaaccaatgccagtggccagctcctttagacttcttgttatctgagaaaaacccctatttgaagaaccattgccacttggatcttttgtgttacttaaagcagaaaacattcctacctgatacagaaataggtaagttataagtgacataaacaaattaaaacagttgacctgttatttttgaaagtgatttgttagataaagttctatttgtgcaataaagcatttaaaaataaaaatattgaggccaggcacagtggctcatgcctgtaatcccagcactttgggaggctgaggcgggcggatcacctgagatcaggagttcaagagcagcctggccagcatggtgaaaccctgtttctactaaaaatacaaaaattagccaggcttggtggcggacacctgtagatccagctactcgggagcctggggcaggagaatcacttgaacctgggaggcagaggttgcagtgagctgagatcctgccactgcactccagcctggatgacagagcgagactccatctcaaagaaataaaaaaaaaaaaaaaaaagtgctgagcttaaagggaaaaatgtttaattttattgctgactatgaacacattgccatttaatccagattattttaattctgatgctaaggccatccattgtcttttgttaggagtcaaacaaaattttagtaaccaaaacatattttcaataaaattttatatgtatataagtaaataacaaaacaacaaaaaacaaaaaaagaacaaaacagcaccaagaacctatgtaaaatttcatcatacaatttctatgcaagctgcttgattacagaaaactgttcaaactgttcatcaaaaactgagtgggattttccattgatatttcagatattcaaatcaacccatattctgagtatcaatctgaattgcacaggttaagatgtgaacccttcacatagtgttgaagatgtgttgaaatctgtacttgaattggcattgttttcctcagagttaggctgccttcatgagaaatatcttctatccctgagagatcagctacatcaagatggctcatcagctaaatcacgttggtcaaaatacctagtaaaaaaaaaacaaaaaatttatgtataaagatattaactgtagcactatttttaatagccaaagaccataagcaacccaaacgtccatcaataagagactggttaaataagctatagtatgtctacatagtggaaaattatgaagccataaaaagagaaatgagggaaatatttatactgctaaagtatgaggaacgtatttatactgctaaagtatgatttccaggatttattaagtgaaaaaaaacgaagtacagaacagattgttctgtatgctaccttatgtgagtatgtgtaggactgccaatatacgtgtttgtttatatttttcttttcctttttgagacaaggtctcactctgtcacccaggctggagtgcagtggcatgatcatggctcatttcccagactggtcttgaactcctgggctcaaacaattctccagcctcagtctctcgaagtgctggaattacaggcttgagccaccacatgcggcctacttatacttttaaaaagaaacaatgaatgaaaagatgaaacaaaaattagtaatacaatggttaactagaggagaaaggaaaaaagaggataatgaggataaagatggatgctaaaatactccaaatgtaccttgaattataattttaactttggcaaggtaactattttatgtaattataagattaaataaaaaggaaaatcactaatcaaattttgtcatggctcactgcattcttgaacccctggactcaagcaatcctcccaccttgacctcccaaagcactgggcttacaggtgtgagtcaytgtgcccagctttccttttttttttcttttttcttttttttttgagatggagtttcgttcttgttgcccaggctggagtgcaatggcacgatctcagctcactgcaacctccacctcccaggttcaagtgattctcctgcctcaccatcccgagtagctgggattacaggcgtgaaccaccgtgcccggctaattttcctatttttagtagaggcgaggtttcaccatgttggccaggctagtcttgaactcctgacttaaggtgatccacccgccttggcctcccaaagtggtgggattacaggtatgagccaccatgcccggtcctttttttcctaaactttcaaatctttgtgtcttctattgtaaagctgttagcttcagaaccttttgtagtctagaactttttccatttttatctaactttttgagggcaaaaaatacacttgaatgtttttgctttcataattgcataatactgtaaaatctcaactgaggyagtcagaaactatacttgtctgaggtttcattaattactggtttgctgagctaccaattacttaacctttctgaatctgtgtcattatctgtaaaaggaaaaaaatcaagtccaacagagctgaaaggaaaaaatttattaaaacaaaaacaaaaacaaaaacacaactctgatctattgtaaagagtagagatactatacataaagtaagtagggcaatgctatatcatctcatttaactgctactaccaacagatgaggtaggtattagcttaatttttgatcagcatagttaaaagcttagctccrgagtcaaagttgcctgggtttggatcattactctaacacttactagctttgtgatggtagtaatattatttaacctctctctgccatggtttcctcatctgtaaactgttaacagtacccaccttagaaggattaaatgggttcctcactaagaaaaatgcttggcacaaattgcccagtaaatgttaattatcatcagcagcataattattgtagatcaagaaactagatattgaatatgtgaaaatatggaaacaagattacttgccttcccaatatttaagtatattataaagctttaaaaaggtactggcaatgaaataaaaacactgatctatggaacaaaaatatgtccaggaggagacctaaaataaatatgtgtgttttactgcctggccaataatggtgaaactccgtctccacaaaattacaaaaattagccgggcatgatggcaggtgcctgtaatcccagctacttgggaggctgaggggggagaattgcttgaacccaggaggtgaaggttgtagtgagccgagatggtgccattgcactccagcctgggcaacagagcgagactctgtctcaaaacaaaacaacaaaaaaagttttcaaataaattccaagaagaatttctatgtaagaaatgaaataaaacagatactaaataaaaatatgccacaactgaaaatgaacgcaggacacaggcaattaaacaaaaatgcaggctgaatgcagtggctttacacctgtaatccctgcactttcgraggcttaggtgggaggatcgcttgagcccaggagttttgagaccagcctgggcaacayagtgagaccctgtctctacgaacaattttttttaattagccagrtgtggtggtgcttggttgtggtcctagctactcaggaggctgaggtgggaggattgctggagcccaggaagttaaagctctagtgagctgtgattgcgccactgcaccctaactatagcaacagagtgagactcaaaaaaaaaccaaccaaacaaaaaccaaatgtaataaatacgatctaacctcactgacctcactgataaataataaagaagccaaggattaactatacctgctaaccaagcagattaataaattcaaagcaggaaccctctcatcatctttgctatcctaaaaaaaaaaaaagaaaaatttaaatattgtctgttcctattacttttgaaataaattttctattaagatgtaaaacacgaaacatgaaaactttattatatgacagtaatcatcatgtggaaataggagccctcaaagaaaaagcagagaactgtagagttaatgattccttgagaaacatctaagactatcttttaaataaagattctgaatagggaaaaaaaaataaagagggatctaagggggataacttgggggaaatttttccctggttcctactaaaggaacaataagaatcctgtgtcttaactgtacagtgatgaatatatatatatatattcatatakattatatatgtgtcttaactgtagtgaatatgtattcatatataataaatatatattaatatacatatatgaataaatatatttatcactgtagtcaagacacaggattcttattgttcctctatataatgcatacaatatatgtgaggatatatatagaatatatatgaatatatataatatatattaatcactgtacagtcaagacacaggattcttactgttcttatatatattcattactgaattatataaagatatatatataaagatatatatatatacacacacacacacacacatatatatacacacacacacacacacacacacaccaggtgcagtagctcatgcctgtaatcccagcactttgggaggctgaggcaggtggatcacttgaagtcagcagtttgagaccagtctggccaacatggtgaaaccctgtctctactaaaaatacaaaaattagccaggcatggtggcgggcacctgtaatctcagctactctggaggctaaggcaggagaattgcttgaacctgggaagcggaggttgcagtgagccgagaccgcaccattgcactccagcctcggtgacagagcgagactccatctcacaataaaagaaaaaaaaaaaaaaaaaaaaaaggctgaagctacagcagccatcttggatcataagatgagcatgaggatgaaagccacatatgacaaaactcaaaggtgtgggtgggttactgccatcttagtaaaaatctaatttttttacctacttcttttttgagacagagtcttgctctgttgcccaggcaggagtgcagtggtgcaatctcagctcactgcaacctccgcctcctgggttcgaacgattctcctgcctcagcctcctgagtagctgggatgacaagcacccaccaccacacccagctaaattttgtatttttagtagagacggggtttcaccatgtgggccaggttggtctcaaactcctgacctcaggtgagccacccgcctcagcctcccaaagtgctgggattataggtgtgagccaccacgcccggctcagacttctttatctcagaaaacatttccatattatttaagctactattattttgggctttacaaatctaattgccaccaataaaatattccatgtgttttcctatttcactgaactccttctttaccaccatataaattggtgggtgcttttaattttaaacagtaagttgcaacttaccactaagagcctcacttcagagcaccttcttgcaagctgccgaatcagtgaatgagcctcaggtaacaaaggcttttcaagacaagccaataaagcataaagccatcttccctaaaaaaaaattcaaaaaattaatatttagacaaatackgaaccagaartttattttttaaatgtccaatgttatgcctgattatctgctatgaataaattcatagaacatttaactatattatgtttgggtatagacaagaaagcctcatttggagagccaggtgttatctcttgtatcctataattacagacacaggacattggatacctcaaaatattccctgatctccaaagagtttgtttcagatattcttatgataggaagttctcatttgtaagcagaacactacattaagatgaatataaatactggaaaaaattaagatacatttttttctttgttctgtatggacagatatagaaatcattttataattgtataattttgtcctctggggacatacaaagaaactatactacagatgaaataatcttttgacacttttataaatactttgacaggctcaatgtatccccactcccttttaaaatggggttttcagctacaaaatgaatacatatttgatgcagaaaaactgtgaagaataccacaagcacaagaaaaaacctgcagtcccaacattccagatcaaactttgattcactttaaaaatgttcttgtttttcctattcgtatgtacaactttctttttttttgagacagagtttcactcttgttgcccaggctggagtgcaatggcgcgatctcggctcactgcaacctctgcctcccgggttcaagcaattctcctgtctcagcatcctgagtacctggaattacaggcatgtaccaccacacccggctaattttgtatttttaatagagaccgggtttcaccatgttgttcaggctggtctcgaactcctgacctcaagtgatctgcctgccttagcctcccaaagtggtgagattacaggcgtgagccaccatgcccggctgtacaacyttttttcaatacaatttcatcagttgtaatatcatcttgtagccatcttttttatttataatacataataaaatgtttaccatgttgtttttgtcctttttcttttttttttcgagatggagtctcgttctgtcatccaggctggagtgcagtggtgccatctcggctcactgcaacctctgcctcccaggttcaagcaatcctcctgcctcagcctcctgagtagctgggacaacaggcgcccgccaccatgctcagctaatttttgtatttttagtagagatgggggtttcaccatgttggccaggctggtgtcgaactcctgacctcaagtgatccgcccacctcggcctccctaagtgctgggattacaggagtgagccaccccactcagccatcccttgtagttaaatgggattaacaagggaatgttaagtgtcttgtttagagtatttaataacattcccttgtttaatctcatttaacaacatggggaaagtttattaagtattgcaagtaaaatggtgacaaagggtatgtatattcatcaaggtttttcagatatgatcaccagattgtatcctggaaaggttataccaaatttgtatttccaccagtagtatatacaactttgtttattctaagcaacatatcacttcggggaaacctaaaaaatattaggacaaaatttaaatagcaatttatacaacacactaaatgggttcctcaggcaaactcaaatcaatagttaagactttttcttacagaaaaagattcaaatccaggtttcttttacaaattgtggaattctttttctataaaaaaaaattatatgtttcaacttgactcaaattttaagggatacatttactatgtaaagctagcatttaaattaaatatttaatttaaattaaatattctctacacttgtcccagctactcaggaggctgaggcaggaggattgcttgaacttgggaggcagaggttgcagtgagccgagatggcaccactgcactgcagcctgggtgacagagtgagactccatctcaaaaaaaaaaaaaaaaaaaaaaaacaaacttgtctgcaatgagataaggagtttgtaccttgtaccaggatatacatcaactctttcattgactttttttctccaagactttctcaatgaaggaagtagtatgttgatttacattctagtgtttcttatttgactacaaacaagtatagttcagattatacatatatatatayacacacacacacatatacaaatataaatataaatataaatactggctgggtgcagtggctcacgcctgtaattccaacactttgagaggtggaggcgggcagatcacctgaggtcatgagttcaagaccagtctggccaacatggagaaagcctgtctctacaaaaatacaaaaattagctgggtgtggtggcaggtgcctgtaatcccagctacttgggaggctgaggcaggagaatcacttgaaaccaggaggtggaggctgcagtgagccgagatcgcgctacygcactccagcctgggcaacagagggagattccatgtcaaaacaaacaaataaataawaaataaataaataccgtagcatcacatcaagtacagtcatgcatcacttaatgaagggagatatattctgagaaatgcattgttaggtgatttttgaccctggatgaacatcatagagtatacttacacaaacctagatggtatagtctactatacctagactatattgcatagccaattgctcctaggctacaaacctatatagcacattactatactgaatactgtaggcaactgtaacataatggtaaacatttgtgcatccaaaaaaaccatatatttatttcttaagatagggtctcactctgtcactcaggctagagtgcagtgcagtggcacaatcatggctcactgcagcctcaacctccctggccttaggtgatcctcctgcctcagccctccctagtagttgggattacaggcatgagccactgtgcctggccagatctaaacatatttaaatactggaaaggagccgggctcagtggctcatgcttgtaatccaaacagtttgggaggccaaggtgggaagaacacttgagcctaggagtctgagatcagcctggggaacatggtgagacctcgtctctatttaaaaaacacaaaaggccgcacacatggtggctcatgcctgtaattcccagcattttgggagggtgaggaggcaggatcatttggactcagttcaagaccagcctggacaacacagtgagaccttgtctctaataaaaaaaacaaaaaacaaaaaacaaaaaaaactgggcgtggctgcatgcgcctgtagtcccagctactcaggagattgaggcaggaggattgcttgagctggggagatcaaggttgcagtgagctatgattgtaatactgcaccccagcctgggtaacagagcgagaccttgtctcaaaaaaaaaaaaaaaaaaaaaaaagaaaagaaaaaaagaaaatgtgcagtaaaaatacagtattataatcctataggagcaccattgtatatgtggcccacagttgacccaaaacgtctaatttttgcctacattatgaaaagaaaaacatgcaatactaccaattctggagtaaagtctctttctccaaaccaattactcagatattccaagacactagttactgttgcctaaaaaaaaaaagagggggtggagaagagttgtattaataataaaacatgaattcaacatgagtttcattaagtttatttagaaagcaactctgatgttaaaaatggcctcattctttaaactttcaaagaaagctaatttgtttgactctaattagtttgattaggcggcttatccaatgaggcttttttttttttttttttttttttttgagatagagtctcactctgttgcccaggctggagcgcactggtgcgatcttggctcactgcaacctccgcctcccgggttcaagcaattctcctgcctcagccccctgagtagctgagattacatgcgtgcaccaccacgtccggctaatttttgtatttttagtagagacagggtttctgcatgttggtcaggctggtcgaactctcgacctcaggtgatccgccctcctcggcctcccaaagtgctgcgatcacaggtgtgaggcaccgcgcctagccccagtgaggcttttaaaacaaatattttcacactttcaaatatcaactaacaccttggtttaaatcctaggatttagtttgtaactattaataatttagtttgtaactacttgaaagacttcacaaggttaaaagaaaatgtatttgtggccaggctcagtggctcttgccagtaatctcagcactttgggaggccgaggcaggtggatcacttgatgtcagtttgagaccagccaggccaacatggtgaaaccccatctctactaaaaatacaaaaattagccgggcatggtggtgagtgaatgcagtcccagctactagggaggctgaggccggggaatcccttgaacctgggaggcagaggttgcagtgagccaggattttgccactgcactccagcctgggcaacagagtgagactctgtctcaaaaaaaaaaaaaaaaaaaaaaaacaatggcacacctgaggtcaggagtttgagaccagcctggccaacacggcaaaaccccgtctctactaaaaatacaaaaattagccaggcatggtggcggggtctgtaatcctagctactcgggaggctgagacaggagaactgcttgaacccaggaggcagaggttgcagtgagctgagatcctgccgcttcagtacagcctgggcaaaaggcgaaactctgtctcaaaaaaaaaaaaaaaaaargatgtatttgtaaaaataccatcagttggccaggcgcggtgggctcatgcctataatcccagcactttgggaggccgaggcgggtggatcacaaggtcgggagacaaagaccatcctggccaacacggtaaaccccatccctgctaaaatacaaaaaattagctgggtgtgatggtgtgcgcctgtagtcctagctactagggaggctgaggcaggggaattgcttgaacctgggaggtggaggttgcagtgagccaagattgtgccactgcactccagcctggcgacagagcgagactccctctcaaaaaacaaaacaaaacaaaacaaaacaaaaaaaccatcagtttatttctaaattcaaattaaatcaaagtacaaatctgaataaaaatttaggtggagaaaaatctgttcttaaactatacagatggatttatcaaactcttgaaaataatctctggtttattcaaatacagttgatggttacaacaaaaatgacactgatggaatttagtatgactgctacaatatcttaatgcaaatgattaagtaacactatcagcttgtgtattatttccaagagaatatcacccacaaaaaaaattgttggctgggcccagtggttcacacctgtattcccagcactttgggaggctgaggtgggaggatcgcttgagctcaggagttccagaccagcctggacaacacagtgagaccttgtctctaccaaaaataaacaaaattagccaggcatggtagcacatgcctgtggtcccagctaccaggaggctgaggtgggaggattgcctgagccccaaagtacaagactgcagtgagccaagatcacatcactgtactccagcatgggcaagagaatgagaccctgccaaaaaaaaaaaaaaaggcttccaaaggtacccaatgctatgtgaagataaaattaaatttttatttgctttttaaatgaataagagtccttactcctaaaaaactgaagaaccaaactccataattcttcccttttgatccaagaaatcatatatttcaatctttcttttttttttttttgagacagagtctcgccctgtcgcccaggctggagtgcaatggcacgatctcggctcactgcaacctctgcctcccaggttcaagcgattctcctgcctcagcctcccaaatagctgggattacaagtgcacacctccacatccagctaatttttgtatttttagtagagatggggttttaccatgttggccaggctggtctcgaactcctgaccttgtgatccacctgccttgacctcccaaagtgccgggattacaggcataagccaccgcgcccggcccatatttcaatcttaatagaatgtataggacatctagaactagaaatagcaatctaaccttagtacagatgcccctgaacttgcaatggggttatgtgctgataaacacattgtaaagttgaaaattcctaaaatggctgggcatggtggctcatgcctgtaattccagcactttgggaggccaaggtgggtggatcagttgaggccaggagttcgagaccaacgtggccaacatgacaaaatcctctctctactgaaaatacaaaaattagccaggcatggtgggaaaaaaggaatcctaaactgaaccattgtaagtcagggaccttgtatttaattcaaaccccagaatctaagacttataactgaaagctacagaaatgaatactctagcaccatgattaagacagagcatgagctctggagttagatctacctggcactgaatctcagtactgccatttacttgctgaaaaaccacctgcaagttacttaacctcaaatgctgtttcctcatctataaaaagtagttatcaataataactctccatagagggttgtagtamggattaaataagaaccattaaagagcttaggacaaagtcttgcatactgtaagaattcagtatatgtattaacaattcaaatactttcacacacaatgcaaacaaaagaatgcatatatctctattattaattttacctgattcattctgctaacaatactaagcaagggaggaaaaccaatctgaaagaaaaaatgagactgaattttactaaatggtattataagcttcatttttttttttcaaactggtgaatttcttgccacactgttgtttagaaacaaagaacaaataaaagaaaattctttcattgtccataacaatgagacattccggaaactactatgtttgtaatgcggaagaaaataacgccttaaattttgaatatgtaattttttttttagatggggtctcactctgtcacccaggctggagtgtagtggcgcgatcttggctcactgcaacctctgcttcctgggctcaggtgatgctcccacctcagcctcacgagtagctaggaccacaggtgcatgtcaacacgcccagctaatttttttgtatttttggtagagatgaggttttgccatgttgcccaggttggtctggaactcctgagctcaagtgatctacctgccagagcctcccaaagtgctgtgattacaggcatgagccacctcacctggtctgaatttgtaaatttttaaataaagtatgattttagtaagtaaaatgttaaagactaaaaattttttacatgatagtacttgaaaaaactaacttattaagtatatccaataaaactgtaacattgataagaygacattaatatgttgtatacaccatttcaaaatcttcagctaaagctaatattttcaagaattaaggacacttgaattagaatgacatttttaaaacctaatttgattcaatttttaaaagtctactttggagtctgaggctgtgattgctaattatgaaaataccactgatttgtgagaaacttaagaggatatacattaaacgcttacttccttaagggttttttttaacatggtgtattttacttgtatgtattctctgaaaataagctaaataagtaagttttaattctttataaattaaaaaccatttttggctagccatgatagctcatgcctataatcccagcaggaggattgcctgagcccaggagtttcaggccaaccttgcaacatggtgaaaacttctctctacaaaaaaatttttttaaaaaattaaaaaacttatcgctacaaaaaatttaaaaattagctgggtgtggtggtgggtgcctgctgcccctggtatgttgaaggctgacgtgggaggattgcttgagcccaggaggttgaagctgtaatgagctatgagtgcactactgcactccagcctggatgacggaagaagaccctgtctcaaaaaaaaaaaaaaaaaaaaaaaaaaaataatatatatatatatatatagctatttttgaaatgtagcatatgttaaggatatcatccaaaagatcaattggttatatagaaagagtaccaaattaacttccctaagatttgagtctatttatactcctgtaccacgtctaagagtgcttgtttccccagctcttgtcaatatggtgtatcaaactttcttggccaatatgttacctgaaaaatagcaccttggcatagttatgttatacttctattacaagtgatttttggcatcttgtcatataagaataattttatttcctttctgtgaggtatctatatcctttggctattttttcttgggcaggggaggggtgattcttggtctttttattgattcttggggctttttacatttttaggaaaaattagttttaaatgtgaaaaacacaatgtggcaccatatagcaaataataaatacctgttgaactgaaaagaactacatgctatagggagtaagcgctaatgcagaggcatgcactggattctcaaggaacacctgcaaacttgggggcaggtaaatcctgaaggacaaggagttgtctacataacttatgattacagccacatgaattttaaagatatcctcaacatttcatctttagaatatgtgatttattttttacaggcccatgaagtgatagatgtgattatgcattttaaagcacctaattgtgtcgatttccattttttccctggctactcataacactgtttgcctgatgcctcatcatttaaaaaaactatgaatcttatccaactcataaaatgattaccaagccaaacataagggatatgaagccaaactaaaaaaagtcacagtaaattgtttcagaaactaagctgttttgttaggttgaagagctaataaactaagtctgggttggcaaacattttctatcaagagtcagacagcaaatattttaggctttgcaggccacataaagtctcagccacatattatttgtttcttttttactctttcaaaacctaaaaacaatccttagctcatggatataaaaaaggccatgaactggacttggcccagggtagagtttgctgaccccttatattaagtggtgcaccaaaattaaaatgctttttgttctgtttatccacacagcccttacttgtacataatctattccaggactttcatttgtggctggtccaacagccccgtcagcacataacttttcacccagacaaaatttcttccagccttcttcatcttcagattttggctaaaagaaaaaaaaaaaaactgatttattcctgtgtattaatttttacactgaacagtaaaaaaaaagaagttaagtccttccatattcccattaccgcaacccaaagatacggagccagttatggggagaatctctgcccccaaatttgtatgttaaaaccttaaactccagtacctcagaatgtgactgtatttggagacagggcctttaaagaagtgattaatttaaattgaggccattagggtgagccgtaatccaatcttactagtgtccttataagaggaaatttggattcacaaagagacaccagggactcccacacacagaggaaagaccacgtgagaaaacagggagaaggtggccctatgcaagccaaggagaaaagcctcagaagagaccaaccttaggccgggtgcggtggttcacgcctgtaatcccagcactttgggaggccgaggcaggcgatcacatgaagtcaggagttcaagaccagcctggccaacatggcaaaaccccacctctamtaaaaatacaaaaaaaaaaaaaatyagccggatgtggtggtgcacacctgtaatcccagctacccagaggctgaggcaggagaatcactcgagcctgggaggcggaggctgcagtgagcagagattgcgtcattgcactctagcctgggcaacaagagcgaaactctgcctcaaaaaacaaacaaacaaacaaaaagagaccaaccttgctgccaccttgttctttgactttcagccttcaagactgagaaaataaatacatttctgttgtttaatccacctagtctgttatggcagccctgacaaacatagtgcctaagtggctacacaatatgtgggacatgttgtttttccttattattacattttttgagacagggtcttgctctgtcgcccaagttggagtgcagaggtgtgattacagttcattgcagcctgaatctcgggctcaaataattctgccacctcagcctcttgagtagctgggactacaggcatgtgccaccatgcctgataatttttaaattttttttgtagagatagttgtctcactatgttgcccaggctggtctcaaactcctggcctcaagcaattcttctgctttggcttcccaaagtgctgggattacaagtgtgagccactgtgcccagccaagatgtgtttagtttggacaagactttagtggacactgacagacaatggtgtgtccaaaagaggatgataaagacagaaataagtatgggggaaaaaatgcaccaagaacacttaatagaatgaaggatatttatcccatgtaaagagacatgattacatatttcacatatttgaagggttgtccagtcaaagaagaaacagatctactcatgctgccagacagaaaaagcaggacgcaggactatttgggagaagcattcagctcaatataacctccttaacaaaataacctttgtttgtacatatcaccttgtatattactttgcataggtgcattttccccctagggataagtagctttcattaaatccttaggatgaatcacctgaggtcaggagttcgagactagcctggaaatatggtgaaaccccgtctctactaaaaatacaaaaattagctgggtgtggtggcaggcacctgtaatcccagctacttgggaggctgaggcaggagaattgcttgaatccaagagacagaggttgcagtgagccaagattgtgccactgcactccagactgggcaacaagagcaaaactccatctcaaaaaaataaataaaataaaataaaataaaataaaacctcacgatgaacatgagaccactacaaagttaaaccctattgtcttggaataaggttatctaccttttcctaacactctattaggtcagaagctgtttctgtttcagttagtactgaatatcctgattattaaatatagcacatgcttaaattattggatcaattaataaacaaatgtttatgttttcacacagttgccatcacagtgtactttattttttaaataatttaaatagagacagggttttgccatgttgcccaggctggtctcgaactcctgagctcaggtgatctgcccacctcagcctcccaaagtgctgggattataggcatgagccactgtgcctggctcagagtgtactttaaaacattttcattttattacttatatgatgtttgcatttgccatgacaaacacttaaaattgctacataatattccactgttctgatggaccatagtttattgaatcaattatgttaggtcatttccatttttgacaaaattttatcaagtcataatgttactgatgtggcttcttttttagttagtgggcatgcacccaaaaggccttccgctaagtaagaaaaaaaatatatttacctacctagccctgtccctactacatacatacatccttggtactaggaaggcaccattgcatagtcaaaggcacacaggctttagagacagaccaacttgggtttgaaccttaagcataccttttgtgtgtttatgtgcgcatgcttctttgatagaaggactagctataccttttacaagttaaatgaccattggcaagtgataagttacttcccttcacgcttttcctggagcagagcttccaaatggtatgcagaagcatacagagatgccatatactgaatctctcagctttcggctggtttcaggaagaatatgcaagcagtcatttattctaatgtgtcaccatgtaaaagatatcaggaagcactgcctaaaggaagcttctaaaatctaaaatctatgaactacctgaaactaaaatgttgtgcataggtgcattttttttccctctgaagataaatagctttcattagattctacgaaagaatatgaagtcccctaaaaggttaaaaactactgtcctgagacaatgtatcatctttccaactccttttttcatttggtagtcctgatatatctactaaagggcttaaagttatatctaaactgataaaatataggacatatgcatgacaatatacatgacaggtttcacttatatgtcactggaattgtgacacagactcatcacattaagcagaagcagaatccattcacaagttctgtaaacatgtgagtttactgcatggcaccatcacctcatcaggaaaatccattaaggctttattcaattttttttgtaaatattgaaaatgtatttatttcctagaaagtaaatgtctagaagaatccttaaaaacttgtggaagtttcacagtcacctatccaaagtcccccaagatattgtgaattaaaattgacatgaaaggctgggtacagtagctcatgcctgtaatccagcactcggggaggctagggcaggaggatcacttgagcccaggagtaagagaccagcctgggtaacacagggagaccttgtctctacaaaaaattttaacaattagctgggcatggtggtatatgccttaagttcgagctacttggaaggcggtggtgggaggatcacttgagcccaggaggtcaaggctgcagtgagccatgactgcactctagcctgggagacagagcaagaccctgtctcaaaaaaaaaaaaaaaaaaaatttgtcatgaaaatctatactttccaggctactaatgtaatgaattgttactattaatggtatattgaagagaatgaaagtaacactgactaggcaagtgaatctttaacgactggaagtaaatatagactctttcaatcaggtatacattgtacatcttaaaactgagaaacttacataccattgtcacattactatccaactgttgtgatttccagtgacttctatgtttgttcacattctaaaggaagaaaacttagacattagatggtactcttcaaaaaatggataactgaaatcagtttctgcacaaaattgtaaccatctaaaacttgaaaaatgggaaaggtgggagggggtgagatgtaaaagaccatgtattgggtacagagtacactacttgggtgacaagtgcaccaaaatctcagaaatcaccactaaagaacttatccatgtaaccaaaaaccacctgttccccaaaactattgaaataaataaacaaacaaataaaaataaacaaaacttagaaaatatttcaaactgtattatgtctaatgattataaaaataatttggtaattaattcatgaatattctgtatactttaggatcataaattttatttttccagctacagyctaagaacagaaataaatccaacaggggcttaattagattaaatatgacacttacctgtcgaacagttgaaaactgtgccacttgttgctgttgccattgaagtgttggggaataaccttcaggggcgggttggcatcctgaaagctagagatcaagttcacaaatattaggatcaacattagtgtcaaaactagaatctcatgcctctgcaaagcaaaagtaaaaccaagataaagtgtataataaaataaagattatacaagaaaataaaatatttttgcagatgtaaaaaagtaggcatttcactttattatttatatctcagttaaaaatattagggaaagagccttagtcaccttaatcagagaaatctggaaaggtttatagttggagtttctatgaaatctaaatgacatgagcctggagaatatgatctagccctacctgcctttctagaatagcaaaacagaaacaaaaagagagatataccacaaataaagaattctggtatgaaatacagttagaaggaatgagttctagcattcaatagcacagtagagtgactacagttaacaataatttattgtatatttcaaaacagctagaagatttgaatgttcccaaaagaaagaaatgataaatgaggtgatggctatcctaattactgattattatacattgtatgcatgtatcaaaatatcacatatactccataaatatgtacaattattattgtgcctgmgtgataaagcatgaaattatgattattatgtatcaataaaattaaaaataagaactttggtatgggcaaaatgtacttaaagacgcttaactttaaattgtctacttctgttttcttttttttttttttttgagacggagtttcgctcctgttgctcaggctggagtgcaatggccatctcagctcactgcaatctccgtctcccgggttcaagcaattctcctgcctcagcctcccgagtagctgggattacaggcatgtgccaccacacccggctaattttgtatttttagtagagatggggtttctccatgttggtcgggctggtcttgaactccccacctcaggtgatccgcctgacttggcctcccaaagtgctgggattacaggtgtgagccactaagcccagccatacttctgttttctaaaagagcacatacagcctgagcaacatatcaagaccccgtcgctacaaaaaatacaattagctgggcacggtggcacatgcttgtcatctcagctactggggagactgaggtgggaggatggcttgagcccaagaactcgaggctgcagtgagctatgatcgtggcactgtactctggcctgtgcaacaaagcgagaccctgtctcaatcaatcaatcaatcaatccatcaaattaggtatattaagacattctgttccattaaatgtccatcaactaaaaaaccctgaagaggaattataggaaaaattacagtgtctgaattaaaatttcctgattacaagtatcagttagagaaactactttgagcatgaaaaggaaattactatcaactatttaaaatgccactctcccaggcgcctgtagtcccagctactcgggaggctgaggcaggagaatggtgtgaacccgggaggcagaggttgcagtgagccgagatcgcgccactgcactccagcctgggcgacagagcgagactctgagactccatctcaaaaaaaaaaaaaaagaaaaagaaataaaataaaatgccaccctcctttgagcttaggttaaatagcacctccttagagagacctttgctggccaggcgtggtggctcacatctgtaatcccagcactttaggaggcagaggcaggcagatcacttcaggtcaggagtttgagaccagcctggccaacatggtaaaaccacgtctctactaaaaatacaaaaattagtcaggtgtggtggcacacgcctgtaatcctagctactcagggggctgaggcaagagaagctcttgaacctgagaggcagaggttgtgatgagctgagattgtgccactgcactccagcctgggcgraaaattgagacgcaaaaaaaaaagggggaaaaagagagcccttctatgattcctctacagtagttctgtcatttattgattattatacatgcttattttcttcatagcaataatcacaatatgtaattatttgtttgcttgtttactctctgtcttcctcaggagggtatgtaaactctacaagggtaggaaccttttttgtcttaccctctgttgaattcccaatgcccggcacaacctagttgcttaattaaagatgtgctggataaataaataaatgaaaatgtccagagtgtgcaagtagctataaaagtgtaaggccgggtatggtggctcacacctgtaatcccagcagtttgggaggcagaggtgggcgcatcacgaggtcaggagttcaagaccagactggacaacatggtgaaaccccgtctctactaaaaatacaaaaattagccgggtgtggtggtgggcgcctgtaatcccagctactcgggaggctgaggcacggtaatcgcttgaaaccggaaggcagaggttgcagtgagctgagatcgcaccactgcactgcagcctgggcaacaagagtgaaactgtctcaaaaaaaaaaaaaaaaaaagtgtaagacatctgggtttctattcttaaaaaaagtgaaacttggtcaaattcagaacatgcaaagcacactaagattaaacaccaatccaataactggaaaaagttccttaaaaaataaaggggccaggtgaggtggctcacgcctgtgatcccaacgctttgggtggcagaggagggaggatcacttgaggccargagttccagaccagctggcaacagagactccctctctataaacaaacaaacaagcaaaaaataaaagataacataagtaacccatttaaagactcctttgaaaggactggataatgtcctgaagtaagatgggcaacactccacaaaggctagagttacagaaagcctctttagaggcagtaaatgccaattgtctttctgaaggaaaaagtacaagcgaatgtctaactttgcacrgagtagtcaaatcttacgtcataattgatgctgtcagatactataggaagagcgttagtcttttaattggggggttgggggtaatctccagacggttaataaaactcacagaaatattcacactttgcttccttttcaacttctttgggtcaatttgagctaccacaacatctggacattgagctgcttcgatcctacaaataagtaataaacgcgataaattaaatttmtgttgtgctttgctcaggtgyagtaaaacaagcgatccacttccacagttcattgtgaaatcagaaaaaaattcagacttccaattgaggtactaaacaatgtatttctgaaattatctggattgaaaacaaatctaagagcacacatcttgatacgtgcaatcacgttcaacagaaactcgcccacgttaggatgtaatccagaatcctgaatagacctgaactcgcaacagactggaacgggaatagagcaccgagggctgtacccaggggcagggcagaagaccagcccacccgcccagggccgaatcactcactggacccgcctcaggtattcctgaggcgtcctcgggggtaccgagggatcgaaaccttccgtcaagtcgcaaggctctaccggcaatagccgaggcatcaactcttccactgcggactccgctggtacccacgccatggttttcaaaccagccagttccgctcggcgcatgcgcccattctaggtcacagcgcaggcgyactaatagacaccttaggcgcggagctgagcaagtggcagtttagggagcgttaactgcgcatgaacaaattgctgcttgcctcaaggttaaggctccggtggtgtaataaaggatctgagaatttaattcctagctgaattggttcgaacgcgtttctgggacttttaccctctgttttgtcttctaacgctgggtaaaggccgagggttagcaacttttatgcatccctagtagtgagggatccttaaaaatgttttttgaattaatgaacaatattactgtaattatcattcatggagctctaaattcttaaactcttcataaacacattttctcatttgattcttagaacagtcttgtgaagtgggtggtaatataccgctctcttagggcagggactgaccttccaaagaggaagaaccaattccaacctagatttatgcgatgccaaatgaatgaaaaattaattttctacagaaatttctagtgcttgaccacttcaaagatcactgtatgtttatttggaatgaatattactcctagaatagccagcactttttaatttttgttttaaagaaaaatctcttcgtttaaatacaaatagtgaaaaaaatgaaactaatgctaacacccagaaattaacaaaaatgttaggtcaatcttgttaggtagatagtattattatctccatttcataggtgaggaaacaaggcaagaatgtgcaagaaacaagtataatatctgattatttctaaacaaatacaattgagtgaatacaattgacttattttctaacactgatgtttattttagaaggttaaaaatttttatttatggcactgcctttagtttgcaaggaattgatttcaaaccaggatgtaagtctaaattgaagataaagtgaggatagtccttagcttatttaagtacttaatgcttaggaactgtaactaaacaattgggacacttggaaagatatcacctggctgcaaactacagttatttggttaacaaattttcactggttttgggaaaaacagacttagaatagggagaaatactcctgtcgtccaacattttggtgataatcaaggacaaatttgaaaaagtaagtagtgacgtgaggactaaactgaattttttttttttttttttttgagacggagtctcgctctgtcgcccaggctggagtgcagtggcgcaatctcggctcactgcaagctccgcctcccgggttcacgccattctcctgcctcaggctcccgagtagccgccgggactacaggcactcgccaccacgcccggctaatttattgtatttttagtagagacggggtttcaccttgttagccaggatgatgtcgatctcctgacctcgtgatccacccgcctcggcctcccaaagtgctgggattacaggcatgagccaccgcgcccggcctgatttttttattttgcccaaattcctatctaaggggtctggggagtcatgccctacaaatcataaattctcatcagatgggttttatttaaccctatatatcacgatttacttttcaacctcacttcgaaatgacattacgagacaaagaagaaaataaaaatatttgaccccaaaacatgtttctttgccgtattttgaaatggccctgcaaagctgttctttgtggaggaaattttgcatccgtaaagaatcttggccaggcgcagtggctcatgcctgtaatcccaccactttgggaggccgagctgggcacatcacttgaggtcaggagttcgagaccagcctggccaacatggtgaaaccccgtctttggtaaaaatacaaaatactacctgggcatggtggtgggcgcctgtaatcccagctacttgggagcctgaggcaggagaatcgcttgaatccaggaggcggaggtggcagggagcccagattgtgccattgcactccagcctgggcaacaagagcaaaactccatctcaaaaaaataaaataaaataaaataaaataaaatattacccagccttgacctcccgggctcaagtgatccactcaccttggcctaccaaagtgctgggattacaggtgtgagccactgggccaggccacaaatacattttttttaatttttattttttactgtaaattattagcattttctttcaatttttttctggagaaaaggttaccttgccaatcaactaccaatggaacaatggctaacattggagtttgtgcataagtatgtgtcagaactatgcatggattaaggaagaaaggagacaataggagaatggaacaaaggttgtcctgggaaataataataaattattttccaaaagaagaggtaataatatagcttcgtgctacttcaaatctaattttatttaaaagaattagtaatgattttttgagtgaagttttcagaaattgcactaagtattttttaatgcttcagtgaaatatggaacacatgagataagttatatttggttgatgaagttattctgaaaaaacgctatttggaaaggtgaacttctgaaactacaataacatttcatctattcccaggaagaaatattcctaaggtactgaactacttctggtgccctgtttttagagatttatcgccggtttttagtttatgatggaaaaattcttgtttcagtatttctcacacgattggttagctgtaggagttacatgacgattgtgagaacagaacattctgttgtgtgtttattgatgatgtggctgtttattgatgatggaggcatctgttaagtcaaccttacacagccaactacagtttatctctgtctctgtgttttcttttcttttattattttcctttttttttttttttttttgagacggagtctcgctctgtcacccaggctggagtgcagtggtactgctcactgccacctgtgcctcccgggttcaagtgattctcctgcctcagcctcctgaggagctgggattataggcacccaccaccatgcccggctaatttttttatttttagtagagacgggttttgccatgttggccaggctggtcttaaactcctgacctcagatgatctagctgcttcagcctcccatgtctctgtgttttctatccctttaagtggctcagttattctcaaatgttagtgtgtataagagtcatccggctggacgtggtggctcacacctgtaatcccagcactttgggaggccaaggcaggtggatcacttgaaatcaggagtttgagatcagcgtggccatcatggtgagacccctgtctctactaaaaatacaaaaaattagctgggcatggtggcgtgcacctgtaatcccagctacttgggaggctgaggtgggagaattgcttgaacccaggaggcagaggttgcagtgagccgagatagcaccactgtactccagcctgggcgatggagtgagactcagtctccaaaaaaaaaaaaaaactggaagaaattatttaaaatatggaatcctgtattttacagctatttcttccagagcttctgtttctgttgatggggtgtggggctaagaaactgacattttaaaaggcattctaggtgggattttttttttttgagacagaatcttgctctgtcgccctgttgcccaggctgcagtgtagttgcgatctttgctcacagcaacctccgcctctcctgtgtttgagcgagtcttgtgcctcagccttctgaggccaccacacctggctaatttttgtatttttaggagacacagggtttcgccacattccagccctccggcgctgtttttctctttctcagggctaaatcttttacatggattatctcgtttaatcttcacaatacatggccatttaagtggtagttactattgttatcttcatttgcaggtgaagaaactgtgcaacatgcccagatcatacaacaaggaagtaatggaattgagattctatcctgggcgccaagccattgctctaaatctctatgctgcacaagatacagctgagtaaagattagtaacaacaaaaaaaaacaacaaaaaaagacaagtcccagggaaggttcctgtgagtctttatgatccactggccataaattagagagaggcaatgaagactaaatgcggagagatccagtttgcttcctagtcttagtacattgccatctaggcatgagtagtctccttgtctccgttgtctgagaatgctatcctctggctctgaggtccagagccactaagagagaatgctgacttgatgtcagaaaatcaagacaaggtctagtttaattatggaacatgaaacaaaaactttactcctcttttgaagtaaaaatgcaaatctgttccgttttagagtgggatttccctcctttgttatatggcttttaaattactcatgttctttacaaatcaaataaataaaagataaaaagaaaaataaatatgccagtagatattcatgttttctttgggccactgtaaatggtttaagggcaaatcaacaaatttcatttgtttaggtttttttttgagacgagtctcgttcttttgcccaggctggagtgcagtgacgcgatctcggctcactgcaagctccgcctccgggttcacgccgttctccttcctcagcctccggagtagctgggattacaggcgcatgtcaccatgcccggctaatttttgtatttttagtagagacggggtttcactgtgttagccaggatggtctcgatctcctgacctcatgatccgcctgcctcggcctcccaaagtgctgggattacagatgtaagccactgggccaggcccctcatttgtttagttttataaaattaactcttaaattctgggattggtcagagtgacagaatgaagagatattggagtatatcactgttggggcactctgtggaatagagaagattgctatttgggccgagcgtggtgggtcatggctgtaatcccagcactttgggagatcgaggtaggaggatcacttgagcccaggaatttgagaccagcctggttaaaccccatctatacaaaaaatacaaaaattagctgggcatcctggcacacacctgtaagtcccagctgcccaggaggcttaggtggaaagatcacctgagcccaggaggtcgaggctgcaataagctgtgatcctgccactgtactccaggctaggtgacacagtgagaccctgtctcaaaaatatatataaaatataaaataaacaattgctatttgaacaagagttagaaaatctagtcttgtcagcatttaaagaggaaaagacaggcatgaaatgaaaactcagtgttgtaggttttttttgttatttagtttttatttcataattataaacttaactctgcaatccagctaggcatggacggaaacaaggaaaacatggaacccaaaggaaactgcagtgagagcacaaagattataggatactgcgaaaaaatggggtgaaggcgtgctctattgagctacagacagaatggtctggtggttaagataaaaacacaagtcaaacttattagagttatccacagtcagcaatggtggtcttggtcttgccactggacccaaagcactccatggcctccacaatattcatgccttctttcaacttgccaaagaccacatggcctgccatccaaccactcagtcttggcagtgcagatgaaaaactgggaactgtttgtgatgggtccagcatttgccatggacaagatgccaggacctgtatgctttaggatgaagttctcattattaaatttctccccgtagatggacttgccaccagtgccattatggcatgtgaagtcaccaccctgacacataaaccctggaataattctgtgaaagaagggaacacttataatccaatcctttctctccagtggtcagagcatgagttttctgctgtctttggaaacttttctgcaaactgcttgaaggagacacggcccaagggctcgccgtcaaccacgatgttgaagaacacggtggggttcaccatggttga

SEQ ID NO: 97662 - DNA, 83475 bp, Homo sapiens
ttaaaccccatctatacaaaaaatacaaaaattagctgggcatcctggcacacacctgtaagtcccagctgcccaggaggcttaggtggaaagatcacctgagcccaggaggtcgaggctgcaataagctgtgatcctgccactgtactccaggctaggtgacacagtgagaccctgtctcaaaaatatatataaaatataaaataaacaattgctatttgaacaagagttagaaaatctagtcttgtcagcatttaaagaggaaaagacaggcatgaaatgaaaactcagtgttgtaggttttttttgttatttagtttttatttcataattataaacttaactctgcaatccagctaggcatggacggaaacaaggaaaacatggaacccaaaggaaactgcagtgagagcacaaagattataggatactgcgaaaaaatggggtgaaggcgtgctctattgagctacagacagaatggtctggtggttaagataaaaacacaagtcaaacttattagagttatccacagtcagcaatggtggtcttggtcttgccactggacccaaagcactccatggcctccacaatattcatgccttctttcaacttgccaaagaccacatggcctgccatccaaccactcagtcttggcagtgcagatgaaaaactgggaactgtttgtgatgggtccagcatttgccatggacaagatgccaggacctgtatgctttaggatgaagttctcattattaaatttctccccgtagatggacttgccaccagtgccattatggcatgtgaagtcaccaccctgacacataaaccctggaataattctgtgaaagaagggaacacttataatccaatcctttctctccagtggtcagagcatgagttttctgctgtctttggaaacttttctgcaaactgcttgaaggagacacggcccaagggctcgccgtcaaccacgatgttgaagaacacggtggggttcaccatggttgatagtacagggctccggcagtggtgtctgcaaagccagtgttgtaggttttaaatgagcatcagcaccctggcctagggtgttgttaagtgtgccacttctcttgtcctcacattcatttgtcatgtatggggattagactaaatgatcacaaaggcttgagtttactattctgtaatttccatgtgacttattaattagccttattatatttaatacaattgtagtcattatgagtgcagaatagaggatcagacagatgttattccgtgaatataactttaacacactactggtgctgaaaattcaaaattataagaatctgaatattgctttttcaagtgactactccaaaaatagttggccagtgccttaacctgtcactatctgaacaaatggaagagaatccatgttagaaaaaaactacaagtgcttcatcaatactagaaaacagagtaaacctaaaaaggaaaagtagaggtgaaagctccatctggtggttaacatctacagttccaagaaattgacattatacttcactgactgtagtactggaacctcagtttagaaatacctgtgggttctgaagtaggaagattactggctgttacgtattaactaatatttaatggtggaaggcaaagtctttcatagggtgtttagaatacttgactcaagataatccctgggaaaaaagttgcaaggtcaaatatctttaagaaatgttcttggctatacatgtctttattcgaccacataatctttccctctctttttagtctctggcattttaagaaatgccagtttgaggaaatagtgaacttaggagtatttgcttttaaaagactttcttttgaagggagcttatatgagattttatattttttacaatctcttagatgttctgaccttcctttcacaggagttaaaaaaaattccattccctttctactcttcctcaggttgaaacctcgtaaccagcatactggaaaaaattataggtgtggtagttcatacctataatcccaacactttgaaaggccaaggtgggaggatcccttgagtccaggagttcaattccaacctaggcagcatagcaagaccccatccctatttaaaaaagcaaaaaaagcccacgcctgcaatcccagcactttgggaggccgaggagggcggatcacgaggtcaggagatggagaccatcctggctaactcggtgaaaccccgcctgtactaaaaatacaaaaaaattagccaagcgtggtggcgggcgcctgtagtcccagctactcgggaggctgaggcaggagaatggcgtgaacccgggaggcggagcttgcagcgagccgagatcgtgccactgcactccagcctgggggacagagcaagactccgtctaaaaaaaaaaaaagaaaaaaagggccaggtgcggtggctcacgcttgtaatcccagcactttgggaggctgaggtggtcggatcacttgaggccaggaattcaagactagcctggccaacacggtgacatccctggaattataggcgtgagccactgcgccagcctgactttcatcttttttaaagcatagcttggaataattgatcagtaaggatgaaataattctatggatgatgaagtagcagaacgtttcaacatacaaaaaaaaaaattagtaaatcccactatgtgtcctagatgtataagggtccaatggatctatatgggaattgtaaatagaatgagttttattctattttttaattttatgtattttatttttgagacagaatctcactctatcgcccaggcagtggcacagtcatgtaatggcaccatcacggctcactgctgccttgacctccctgggttgaggttactctcccacctcagcctcctgagtagctgggattaaagtcacacactaccacgctctgctaatttttctatatttttggtacagatggggtttcaccatattttccagggtggtcttgaactcctgggctcaagggatcctcccccttcagcttcccaaactgctaggattacaggtgtgagtcaccacatctatttttttagaaaataaattttctctttgttgtttggaagacttctacgaaggaacaaaaaatcatgaaatatcaatccttaagagtagagcccaaaaacaaaaaaacaaccctgaaaggctaaagttgggtccagtagatcctgatcctgatagtatatccaaggattaaagccattcatcatttttttttttttttgaaacggagtctcgctcggttgcccaggctggagtgcagtggcgtgatctcggctcactgcaacctttgcctcctggattcaagtgattctcctgcctcagcctcctgagtagctgggattacaggcgcctgccactgcgcctggctaatttttgtatttttagtagaaatggggtgtcaacatcttggccaggctggtcttgaactcctaaccttgtgatccacctgcctcagcctcccaaagtgctgggattacaggtgtgaaccgctgcgcctggacttaaagtcattcatcttaaagcacataaagacagatgcaactgagtttgttatgcatcctaacatctatttcattgtaatagggaattaaaacctttgatcaactgaaaacaaaggaatgatgaatttttttttgttttttttttgagatggaatctcggtctgtcgcccaggctggagtgcagtggggcgatctctgctcactgcaggctccacctcctgggttcacgccattctcctgcctcagcctcccgagtagctggctctacaggcgcccgcaactatgtctggctaattttttgtatttttagtagagacagggtttcaccatgttagccaggatggtcttgatctcctgacctcgtgatctgcccacctcggcctcccaaagtgctgggattaccggcgtgagccactgtgcctggccaggaatgatgagtttttgaaaagacttcattgagctggatggtaaagatgcctttctgggaaccatgaaatgaatgaatctaccaaaggtactatgctttgatttattcctcgctggattccaggatttctgtggatcttctcatcaatgttgctatggtctgaatatttgtgtcctaccaaactcataggttgaaatcttaactgctaaggtgatggtatagggaggtagggcctttgggaggtgaacaggtcatgagggctggcctctcatgaatgggattagtacccttgtaaaagagaccccagagagctagccagccccttctgccatgtgagaacaaagaaggcaccatctatgaatcagaaagcaggtcctcaccggacaccaaatctgctggcatcttgatcctggacttctcagcctccaggacagtcagaaataaatttctgttgtttatgagctacccagttgagggcatttgtgttagcagcctaaatggactaagatctttttatcctactcattcttagatcttgtcgcttttggtgggtgtacttattccacctttataacaacacctctgctgtgtgctgttaagaatcttcattaaggtagcaccttgaacctactttatttggaagcctacactaatttttggctttcgattcccattgccctcttcaggattgtattacaatttgacaagcaaacatcctcttccaccttccaaaacaactttagtacacacattatagaaagggaaatatgtttggtgcttttttttttgagacagtctcactctgtcacccaggctggagtgcaatggcgtggtctcggctcactgcaacctccgcctcccgggttcaagcaattcttctgcctcatcctcccgagtagctgggactacaggagcgtgccaccacacccggctaatttttgtatttttagtagagacggtgtttcactatgttggccaggctggtctcgaactccttaccttgtgatccgcctgcctccgcctcccaaagtgttgggattacaggcgtgagccaccgcgcccagcctggtgctgctgtcttatttctcatgaatatgagctttcaaggacagggacttgatctttttttccattccataaaatgttgatatggctaaactttgcaggcttttaggcgttgtcatatatgcaattaattccatgggcacttaatttcattcccctcactgaaggaaggggttgtctgagaccaccaagctctaatgtcttaccaatctgttgctttctcattttgttcaacttttttcttggaaagaaaaacattgaacatatcaagatgaatcagccaaatattgtactgtgtgtgtgttttgggggtggggggagacagagttgaggtggcagaggcaatgtaggaggaaaagacaggctgactaaaatacataaatagtacgtgaattctttcgggccagggatctgggcctactttgcctgcatcatattaccagcatctcaattgtgtctggcacatagtaagtttcagtaaacatttgttgcactaagtgaaagaatgaacttttcacttttttcagagatgtgatttgtgattctcggaatcaaccagggtcctaagatgtcctggaggccgtctccatttctctcggtgagctaaggtgtccgagtggcaccagttctccactctttctgcgacctgcagggagtgggatacgctgtggctttagggagctgggaaaggcgctctctcccggtcccgctctgcccggtcccacgcccctcggccgtccggctgcctgggtcttccgggttcttccgcccctctggctcggtccccgctacctctcctccctcctcccctctcggtaccttcgcccgccgcgcgcctttctcaaatcctccggttattaagcaagctcaggggtccggtggcctgccctggtaactctgcgcccgccccttcctgcccccttcctgccctcacgccccgtcccctcctcttgacgtggcagaggcggcgccagccatgttggccgggcggaggtcttcgctgaggcccggggcggggtggcgccacccctgattgcggtgccacggactgctcctgctgggcggagaggacagattttgcaaagcggaggctgcgacgggtcctgcagggggacagtgaggaaagggccgcctcgtctccgctcctgggggaccgcaggtgcgcagcggggagygggggcgggctggcggcggcgggctgggggctgggatcctggggtggtcccggctctgccctctcggtgccccggggccagcgaggtgtgctggaggctgaggcccggtccggcgcggggagcgttgagtgctgagcttgccaccctctcacccacttcgctctgccggggccgggggcccggcctcctccagctcccctggattaggtggaaagatgtggaaaacggtggttcgagcatctcgcccagcacccacccccacctcctgggccacccacctccacccaagtccatcatcgcctctgggcccttggacttactgtttcattccttgccagatatggagtgtcctagactttgaacccaattgactacgtcaccgtaattcagccttggaagttaaaggggttaaaggggaaaagagcttggtaaagataatgccttgggttttgattacaaagagttcagttttccagcaggaccagccctatctcactgggctttctttctacggtaggtagtgtttcccgatttggtggtaaaggtactgcctgaggaaggtcatagtaaatctacatcaatcactgaagtggggatgtggaattctcgttttcacttgaactccctcaacctctaccgtccaaagccatggataactagccaaattaacttggtttaaaaaggttttagatttaaatataaatgcatgttgagttttccttctctttctcctctggtagtgaatgaacatcatttcagaagtccagctattttttttttttctgagacggagtcttgctctgtcgcccaggctggagtgcagtggcgcaatctcggctcactgcaacctccgcctccctggttcaagcgattctcctgcttcagcctcccgagtagctgggattacaggggcgagctactatgcccggctaatttttgtatctttagtagagacggggtttcaccatgttggccaggctggtctcgaactcctgacctcaggtgatccgcccgcctcggcctcccaaagtgctgggatcacaggcatgagccactgcgcccggccagagtccagctatttttaattgacttrcagaattttagagttagatgggaccttgtgattttctagtccaagtctcttattttgctgatgagaaaaacaggattcagagaggttaattgtccaagatcataagaagacaattcattgaggattttggaagtgaaaagtaggagacaaatttaattggcaactaacaaatacatgtaattggaaggaactcaaatttacttggcaagtacattttcaattagatatgaataaaagggcttaaaattagaatattgaaaaactatcatagggaaagtcttttttgttttttttttttttgagacggagtctcgctctgtcacccaggctggagtgcagtggaacgatttcggctcactgcaacctccgcctcccaggtacaagctaagctattctcctgtctcagccgcctgagtagctgggactacaggcgaccgccaccatgcctggctaatttttgtattttcagtagagacggggtttaaccatattggccaggctggtctcgatctcctgacctcatgatccaccctcctcggcctccaaaagtgctgggattacaggtgtgagccaccgcgcccggccagggaagtcttacttttaaaagacttgggcacatatttgatatactaggttaaagtgacatagtggtttgcttcttagcttttagctctattatgataaattatttaaccaaagtatattgtactgaaattggacatttctttgtaatagtcttttgtgttttgtatcactttttaaaaaaaataaagactagtggctgggtgcggcagtttacgcctgtaatcccagcactttgggaggccgaggcaggccaatcacctgaggtcaggagttcgagaccagcctggccaacgtggtgaaaccccatctctactaaaaatacaaaaattagctgggtgtagtagctcacgcctgtaatcccagctactggggaggctgaggcgggagaatcgcctgaacccgggaggtggaggttgcagtgagccgagattgcaccactgcactccaacctgggtgatagagtgagactccatctcaaaaaaaaaagagactaatatgctaagtctgcattctaatatagtgtgtggaataatatttctttggtttaatacttttatgcaaacatgttagtattaggggagagagtgcttatcaaataatatcatgttatgaaaagctagtttgtggctgggcatggtggctcacacctgtaatcccagcactttgggaggctgaggtgggtggatcacctgaggttgggagttcgagaccagcctgaccaacatggagaaaccccatctctactaaaaatacaaaaattagccaggtgtggtggcttatgcccgtaatcccagctactcaggaggctgaggcgggagaattgcttgaatccgggaggaggagtttgcggtgagccgagatcacgccattgcactccagcctggtcaacgagcgaaactccgtctcaaaaaaaaaaaaaaaagttaagttggcttgtaaaaggactttatttcagatatgccattgtcggacatgggactaagcctggcaaattttgtaattgaattcgtgattttaagattgcatgactcctactatggaaaggtgagggaagtcagggaagtgttgtgcatagccatgtaattggaccaattgagaaacaggtgggattttcttcaaactactgctggaatgtgggaatgtaagaagtataatagatgtgatttagcaagcaaattgatcttagagcagggagattgagaggaaaaaatgtgaagaagagaagagagttgtgcccagatatcactcaggtgatatttagtatgtcttaataagaagtaagaatgtagagatacaatccagccttttaaccagttgtagaaagttaaacctggctattgtctgtgtgtgaatgtcttcctgctaagactcctggaacctttcttagtgaggtttcctaatggtcctaaggcagtggttttcagaacccctaacttaaacattattgagtatccaaagagaaaaaaaaaaggctaaatagaagacaggtgggttttcatatctgtttctgcagtttattgtgatatattgttttggttgaattgtatgaaggattaattaataaattaaaaggttaattgcagtgtggaatctgaaagcttaggagtgacctttttgtactttgttaccttaaaactcattggcctattctacactttgaatggatcatctacccatgtgtgatattttcatatcacaaattgacggtttggaagatattgcttcactgagtaatgtatatcttctaaatgttaatacattttgttatatactatcaaacaaattacattaataccaacactgatctcatcagaaaaatctttacatattaggaacttgtcaagcttatggtagcaggcacaagttttaaaacaatttaatggcggggagcggtgcctcaagcatgtaatcccagcactttgggaggccgaggccggcggatcacgaggtcagacaattgagatcatcctggccaacatggtgaaaccctgtctctactaaaaatacaaaaaattagctgggtatggtggcacgcgcatgtagtcccagctacttgggaggctgaggcaggggaatcgcttgaacccgggaggcagaggttgcagtgagctgagattgccccactgcactccagcctggtgacagagtgagactccgtgtcaaaaaaaaaaaaaaaaaaaaaaacccaaaaacaatttaatgtttgcttgaaagctcaaatttttatcattggcaaaaaatactataagttgttttctatgaagtgataggtttacttcatacatttttgagaaaatatctgtgtaatacctaagtactagttatgtactatccttgggagaattgagaaaacagtcattsaaaacattttttgttttgtgtttcagctattttaatgccttttgcagatgtgttttagatgcattttattttttttttttgttatggcacattagaatttttattttttcttaataacactggatttcttatgacttattttttgtcaaatgtagtcatccctgttctgatttcattttattttattaaattttttttttttttgagaaggagtctcactctgtcgcccaggctagagtgcagtggcatgatctcggctcactgcaacctccacctcccgggttcaagtgattctcctgccttagcctcctgagtagctgggattacaggcactcaccaccagctcagctaatttttgtatttttggtagagatggggtttcaccatgttggccaggctggtcttgaactcctacctcaagcgatccgctggcctcagcctcccaaagtgctaggattacaggcgtgagccactgtgcctggccttaaaattttttttatttttaatttttgtgggtacatagtaggcgtgtacatgcttcttaaattataggagcaattaagtagtaaacacaattttatttgccttatgttctgtataataaatgtggaagaggtttgcatagtcttagaatttatattcacatcagtaacatggaagctgttgctaaaaactggatttctaatcyccccctcacccccacgtcctggttgttttttctttattgccacctatgttacggtggagtttgacatcttctaactctcctctgaatatcccacacctttgttttatcattatctttcaacacttttccttgaaagctcataccacccttctcaaagctgccttctatatttaccttcaaaatagttttgtttttttttttgagatggagtcttgttctgtcgcccaggctggagtgcagtggtgcaatctcagctcaccacaacctctgcccccccagttcaagcgattctcctgcctcagcctcctgagtagctgggattacaggtgcatgccaccctgcccagctaatttttttgtgtgtttttagtagagacggggttttgccatgttgaccaggctggtcttgaactcctgatctcaggtgatccacctgcctcagcctcccaaagtgctgggattacaggcttgagccactgcacccggcccaaaatagtcttttctaaacaagtttagtcttgggatttctctttaccctttatgcacctttgaaaaaccacaatcttttttgattagcgtaagattttctagctgtctccaagattctggcacaattggaggaaatacagtgttttctttaatttttattttcttatttaaagaagagaaagttcttaactgcttggaatgcttagatttgttaagcttcactttctgccatttgttttatgaaaatttatttgaaagattttctaaaattaaaattgttatatctaactttttccccccaaataatatctcttctttcttcacttaaattttagaatcagcttcttgtcccactattgctcttagcaactttaaacatccatgttgggttttccaggcaccctaggttcacagttcacttctttcaacttgacgtccttcctgtctgctgcataacacttgaatgtctttgtcctcccacacctttaaattcttcagcttccttccatgactaactactgttgcagtttgagagcatgagatagagctgttgcctacgtaggaaagccggcatcctacctaggcatttagacagtaaaaatggagctgtcttttgatactggtccctccccagagtgcatcctcttcccttggttagtaaacttaaattattatactgaaattttatatctcaaattggagtttaaaatgctctcataatttggaatgttcaaaatattctgaagtaagtttctgcaaaagagtctaaatgatatataaattgggggaacagcacttatcaagcattttatttattgtgccacaaatagcctgtacttgcacaataagaaaattacctgtccaaagcagaagtgtccagttttaggaaaatctttttgttacataccattaaacattctcttctgtaaagtttagtggaaacttgttatttttcagatagaaaccatgtgagttttagaactttataattttgaaatctgtttatatgaattcttataattttcaaaactgatatggaaaacataggatctaggttttccccctatttttgcatttctttcctatatatccttaaagaaataagacactattttttgccatcatcttttagagtgaataaaaaagtgttaaatacctcttattgggccttgtgaacattgggtagagccattaattattttgttatgagttgcttgctaatttttttctgagataaatattttcatttggtcctgattttttttttttttgagatggagttttgctcttgttgcccaggctggagtgcaacggaatgatctcggctcaccacaaactttgcctccagggttcaagagattctcctgcctcagcctcctgagtagctgggattacaggcatayrccaccatgcctggctaattttgtatttttagtagagacggggtttmttcgtgttggtcaggctggtctcgaactcccgacctcaggtgatccgcctgtctcggcctcccaaagtgctgggattaccggcgtgagccacggggcccagcyggtcctgatttctaaggtgttaatattgctgaatgaggggagaacattcwtattttgaacgttcttaagaggatcctggattttaaaatattttaaaattttgatacagaaataagaatcaaactccacaatgacaacctatttggaattcattcaacaaaatgaagaacgagatggagtccgatttagttggaatgtttggccatcaagtcgactggaagctacaagaatggttgttcctgtggcagccctgtttacaccactgaaagagagacctgacttaccacctattcaatatgaacctgttctgtgtagtaggaccacttgcygtgcagttttgaatcctttatggtaagtaaaatatatagaaaaactaatgtggcaatgtgattttaaaatgtcrgggtttttctgcatatttttataaaaatccctttgtttttgttcatactaattttttcaaattaggacagtcaaaacaatccagagagctgtaaaattttaggatcattctagttgtactgagttggtaatataaagagaccaaatgtaaaagtggcactataaaaactgttagatyccatcagtgtcttctgaatagtggtgctggatgtgtatcaacccatcttgcatcattagataagtcataattggccgggcgtggtggctcatgcctgtaatcccagcactttgggaggccgaggtggtggatcacctgaagtcaggagttcgagaccagcctgacgaacatggtggaaccccgtctctactaaaaatacaaaacttagctggggtgtggtggcatgtgcctgtagtcccagctactcgggaggctgagacaggagaattgcttgaacctgagagatggaggttgcagtgagctgagatcgtgcctctgtactccaactctgggtgacagagcgagactccgcctcaaaaaaaaaaaaaaagttgtgattgagtgacatgatgttccaaaaatgttgtgatttctgttgctgaagccaaaatctcaggaatcatctcttacttctctttccattccctctccccccagccaatccactagcaaatctgggtgatctacctctagaacattatagattctgtctcttacagcctcttattccatctctggtagtataccctgcttcaagataccacagtctttttcctgggcaatttcaatatcctcctacctgctctccctgtttctattcttgtctttcagcagtctgttctctacccagaagctagagttttatgaatgaaaatcagatgatgaacatcttccagtagtagcttcttattcttggaatgagaaatacaaactccttatcaagatctataaagccttgtatgatctagcctctgtatatatttctgccttcatcttgtgttatccattttccttattctcatctacataataccttaaccctgttaccctctttctgattcttgaacataccaaacttactcctaccttgacaatggtatagtagctgtgcattctgcccggattcttctgtctccatattttcgtatgattgcttccttttcattctgatcatactttagttgtctatttaagaaggctgttttttaaagcagccctcttaaacacattctcacattctgctttgttttctttaatctctgttattacaatgtaaaagtatttttggctgggtgcagtagctcacgcctgtaatcccagtgctttgggaggccaaggtgggaggattgcctgggcagcaaagcaagactccatttctacaggaggggaaaaaaaaaaaaaaaaaatatatatatatatatatatatatatatatatatatatatatatatgtgtgtgtgtgtgtgtgtgtgtgtatatatatatgtatatgtgtatatatgcatatatatgtgtatatgtgtatatatgcatatatatgtatatgtgtatatatgcatatatatgtgtatatgtgtatatatgcatatatatgtatatgtgtatatatgcatatatatatatgtatgtgtatatatgcatatatatatatgtatatgtatatgctgggtgtggtggtatgtgtctgtagtcctagctacttgggaggctgaagatgggagaaacacttgagccaggagttcaatgctgcrgggagctatgattctaccattgcactgcagcatgggcaatagaacgagaccctgtctcaaaaaaaacaccaaaagtattttcttgtttgtgcatctgcttgtcttttgtctgttttttctagaatgtaaactccatgagagcagttctctttttcttgtatcaccagcgcctaaaatagtggttggtacttattaggcattcagtaaatatatttttgacctgaataaatgttttctaggtctgagtgtagatgttactgaagtcacttgaagaaaaaaataggattattttaattttattgatatttgctgtatatatgtgtgcatatatatatttttgagatggtttcactctgtcacttagattggagggcagtgttgtgattgtggctcactgtatctttgaccacctgggctcagatgatcctctcacctaagcctcctaagtaaytgggagtgcaggcatgtgccaccacgcctggatgattctttgtattttttgtgaagactgggtttcaccatattgcccaagctggtcttgaactcctggactcaagccatctgccgcctcargcctcccaaagtgctgagattacaggcgtgrcctactgcacccagccaatatttactatatgttaaaagttatattcaccatttaggtaaacttgtatatgttaaaagtrtgaattagatattggcagtatctaaaactacatggcttttaaaagttactttgactatcaatttgaatatgttcatgttttaggaagaaattaattttrttgaaattaggatttttgtaaaattgaactgaaatatgaactgatatgtcttttctttttttttaaaacagtcaagtggattatcgagcaaaactttgggcttgcaacttttgttaccaaaggaatcaggtaagaaaacatccattgcatgccgggcgcagtggctcatgcctgtaatcccagcactttgggaggccgaggcgggtggatcacgaggtcaggagattgagaccatcctggctaacacagtgaaaccccgtctctactaaaaatacaaaaaaaaaattagctgggcgtggtggcaggcgcctgtagtcccagctactcgtgaggctgaggcaggagaatggcatgaacccgggaggtggagcttgcagtgagccgagattgcaccactctactccagcctgggcaacagagcaagactccgtctcaaaaacaaacaaacaaaacaaacaaacaaacaaatgaaaaaaaacccataaaacatccattgcagatgttaatgccaaaatactagtcatgtagaaaaatgcatatttaaaaaaagatacaaataattatttctcatttaatgaaaatgcctttttaaaaataattaaatgatcaggaaatactttgtttaaaattttattaatctttctagcctataatttgttaaaaatttttgtttgttttctatttgtagtttccacctagttatgctggtatatctgaactgaatcagcctgctgaacttttacctcagttttctagcattgaatatgtagttctggtaagaacctaagaacaaatatttaagaaagttttaaaatttatactgaaagaattgttaaattatgatgatttagaaggaatcatgcttaattctcacattgatttgatggaacatttcaaaggtaagaactgttgaggtcagtttgagcagggtaattcctatgttgtacttatttgatgggtggccaagatactgggtagggtggtgtgatttgctatactgagtagatcagtaaacaataaagtataaatcttgctttgtagttggaaggtcagttaacaaatatttagtcaatatgatgctggagttggctaatgtatcccccaggtctaattaatgaaaataatcttgcattggtctttaggaaaatcatttttattctctttctgaatacttaaccatagttgtttacatgttttactgtggaagtaatatcttttatgaatgttttagagaaaacaattatggttcacttggaccattcagtaatttgtccagcctggctagtttctagttatctgaaaatccaagtcaggtttactaattattttaaaagagtcaaatgaaaccttatgcatgtagttaaataaaatggaaagtgaaagtcccctctgtgtaactatacctcatgttcttaaacttaatttttcacctgatgatatgtcttagatctctctccatgacagtagaaataacctgtttcatttctgaaatggctttactaggattcttttgtattcgttatttaattagttccctgttgactgtcttgtatgctgtgctttaaactacatattttttctttttggtgaattttttaaaagcgtggtcctcagatgcctttgatattcctctatgtggttgatacttgcatggaagatgaagatttacaagccctgaaagaatccatgcagatgtcattaagtcttttaccacctacagctttggttggacttattacttttgggagaatggttcaggttcatgaacttggatgtgaaggcatttcaaaaagctatgtcttcagaggaacaaaagatttgtctgccaaacaactgcaggtaaacaacaagaatggtagtttttacctatctgaaaattactctatatatgtttataaatgccttctgtatgtttctaggacaaatttttattatgaataactaatataattgtattataacaaaggctttaaattcagtgctggcttcagttttcttttcatgtgccttaaattgttatacagattaaacacccttcacttttaactatatctttaaaatttaaagtcaaaccaacagtattttactagagatttgaagggcttatgaagagtcatgctgaaggctaagagagagcaactgcagaatattagcttgtttcttttttttttcttaagagttcagcttttttattgaacatgttataaaagaggtttagtcaaaaagaccaaagtccatgtcatcatcatactcctcaggttcttctttctttgtttccactttcttttcctcagctggggcagcagtggtggtgggggcaggaccttctgcaggtgcagcaccaactgttggagcaggtccaccagcccctacattgcagatgaagctcctgatgttgacattggccagtcctttgcaaacaaatcaggccagaaaggttcaacatttatatcagctgctttaacaagggcattgwtctaatccactgtgatggtcacctcattgtcgtgcagaatgaggtccaaggagatacagaagaacttgagatggaggccatgatgtgggcgagtgcagggctggtgctgcctgacatggtgctagtcacctgatgaagtgagggtctcaccccagtgtggtcttggcttcctcataagaaccgagaaccttggtggcagctgaggagagagcttttatttcttaacatttcacttaagaactaaatacttttagtatgtttggtgagggaagttattttgagactggacgatttttagtgtaggaactatggttacatatgttttttagtggtttttatcactgggacaaattgaagctttctcttccaaggcaaaggagttatgtgtagcatactaggatcatctgctcagatgaacatctttttttctgcccagagattttgatagtccataagagagtaataagtgaatgtctgtttgtattgggggatagttggtatatataccttatatatataatataagattgttcatgtaggtactttgaaaaaactttctaagtaattctggtgcaactcctagttgagaacatttaccctagaagatgatagataagcctggcataaagttgacagatgtaaaatcagactttrgaggcttccaggtagaccaaaatgaagaagaaaggaagagatttttgagggtgagtctaatttgaaacttggcagactgaggtagtggtgctgcagttaactaagagaacatactaggggaatttgcaggtttaaatggggaggataatgagtaatgaatgcgttagtcaatgaatagtgaataagatttgagaaggtagagaaagttgaaatttgttctttttcttctgagacaagagtctcgctctgtcacccaggctggactgcattggcacaatcttggctcactgcaacctccgcctcccgggttcaagctattctcctgcctcagcctctcgagtagctgggactactggcacccgccatcatgcccagctaattttggtatttttgtagagacgtggtttcactatgttggccaggctggtcttgaactcctgacctcaggatatccaccttcctcggcctcccagagtgctgggactacaggagtgagccaccgtgctcggcctgaagtttgttcttttaagaggtttgttgaaggtaatgaaggaggagatagcatgggaatttgagagagaactgagttaaagagatgtactttaggaggaaggagaaaggaaagagactaaagagggtgagttaaagcaagagtgagatgaggaaagtcaggtttaggaagacatagtagggattccttcaggagcacaggaagcggagtaccttagagaggagaatcatgtttccatgagacaggagagaaagtgaaccagttgaaatctctgtgctttagtttttttcaattgtaaaatagagatagtaatagtatataccttatagtgtagtcatgagaattaaatgaattgtacatttaagcatttgctactattaatgttattattaaattatgaatttatttagaatagtttactgttctgattgtagagtaccttttacttatataatgcatatgaagcacataaaacatcttcctttttttttctttttttttttttttttgacacggagtcttgctctgtcacccaggctggagtgcagtggcatgatcttgcaatctccgcctccttagttcragcgattctcctgcctcagcctcccgagtagctgggactacaggcgcatgccaccacacccggctaattttttttttctgtatttttagtagagaccgggtttcaccatgttggccaggatggtcttgatctcctgacctcgtgatctgcctgctttggcctcccaaagtgctgggattacaggcgtgagccaccgcgcctggccaatttttgtattttttagtagagacaaggtttcaccatgttagccaggctgcttgaattcctgagctcaggtgatccccctgcctcagcctcccaaagtgctgggattacaggtgtgagccactgaggccggcctagtttttttttgtttgtctgagacagagtctcgctctgtcacccgggctggagtgcggtggcacgatctcagctcactgcaacctctgcctcttgggttcaagcgcttctcttgcctcagcctcccaagtagctgggattacaggagcataccaccatgccttactaatttttgtatttttagtagagttggtgcttcaccatgttagccaaggttggtcttgaacttctgaccttgtgatttgcccaccttgacctcccaaagtgctgggattacaggcatgatccaccgcacctggccctaatttttgtatttttagtagacatggggtttcaccatgttggccaggctggtcttgaactcctgacctcaggtgatccacccgcctcggcctcccaaaatactgggattacagctgtgattcactgcgcctggccacatcttccttttttcaataggcaagtgaatgcctgcagactgaattttttttctccattgaaacatgtttattttctttccctatttagattaaatttccctattctttccctattattagttgaaaagagcctggcctttgctccccagatagtcctggattcaaatcttaaactcttctggttgtatgatcctgggtttttgtctttgctgattgtgtcatccttcatagaaaggaataaactacctattttgccaggttattagtactaaatatgaaattctcaatatggtgtaaacccttatagagctttatagaaaaacctggatttaaaatcttgctttgttacttactgattgtgtaacctcagacaaattacttagtctttctgattgtcaattttcatttataaagtagaatttaagaagaaatctatttcattattgttttgtgaggaaatagtatatataaaggttttagcatagaatatggaacatattaagttcttagtaaagagttgctgtttctgctaacagtataggaaatattgcaggattagttcactaattttatctttgtacatctttagacttcagttttctgttacacagttttataactccagtacttcatgactaagcatttctagattcaagaaaaatttagtataacattattttcatttgtctagagagaaattgtgcacatatctgaaattcaaaacaaaggtggcagttcgtagtttggttatgaattacattagaaaatcaagatgtatataggtacaaagtacgtgagccttataactccccaagtcctaacacttactactgttgcaattttacatttatttatctgttgatttgattaatttatgtttctggattttaatttccatgagggaagggactagttagtttttaccattgtattcctgccacatagcaggtgcttatgatatagtttgctgaaacggatgaatgaatataaattaagaagtatggacatttaagttacacaacaatttattttgactgttaattagaaataaagtgtttttgagctaatatgcctcctctttggttatataacaccttgtgcttttctctctcatgatgattattttgtgttattgttttcttgataatctctcccactggattctttgttttctgaggaaggagaccttgtattttttatttttgtgtttctaatgtctagcacagcattttatacatgataaatagttgataaatctttgtaaaagtaattaaatgaatattgcacaagtaatctctttacaggaaatgctggggctctctaaagtaccasttactcaagcaacacgtggtcctcaggtacagcagccacctccttccaacaggtaataaatatgatgaagagaatttgaccgtttctgtagctattttaaacattccatacccttgaacataggcattcagtgatactatattgttaaatatttttaggaatataagtaaattgtattaacatactttttaaagaattgagtcaaaatcatgtcattaaaatggtttgttttttgtcttaacaatgtaaggagttactttagttttgttattttccttattttttattttgaactttggaaaaaacttgtttttgtgtggttttagggcagccaaggtttttattttttcttcttagctttagaggtagcttttcccgctaaggtttctggagtgcagtggcatgatcttggctcactacaacttccgcctcccaggttcaaacaattctcctgcctcagcctcccaagtagctgggattacaggcatgcaccaccatgcctggctaatttttgtattttttgtagagacggggtttcaccatcccaatctcctgactttatgatcctccctcctcggcctcccaaagtgctgggattacaggtgtgagccaccgcgccctgctagctttttcccctaagctttctaatcagaggtagtattactaaaatttagttgatgtattttctcataattatttcagtaacctaaaacttactagactagtgagagatgaaatcctgaagtacttggtttgagtgtttcgtttattgtggttgtattcaaaatgtggtttctggggctgttatcatcacgtgtcacctaggaatgcgtttgaaatgcaaattcttcggctccactccagacctaccgaaacaaactctagaactgggacctagcaatatgtgttaaaacaagccctccagctggttctcatatacacgaaagtttgagaaccattggtctgctgtgtgttcagagtgttgttttctatttttaggaaagtgaaatttgtttatcgaactctcacccataaacatttacaaatggctttttatttaattctgtttcttagattcttacaaccagtacagaaaatagacatgaatctcacagatcttctgggagaactccagcgagacccttggcctgtaccacagggaaagagacctttgcgttcctctggggtggcactttccatagctgtaggactgctggaggtagggaagatggttttgttttggaatgtaaagtgtgtgtgtgtgtgtgtgtgtgtgtgtgtgtgtgtgtgtgtgtgtatrtrtataattataaggataagaagaaccaaagtgctttttttcctccctattctctcactcagcatcaacaaagaatacttctatggttttcccccacataccaaccaagcagttctgccttcgataccacctgggtgtcctgtaattcagttcaattctgatactatctaactggagataacatcacatctcacagattgagggctcagtcccacaagactgcccccacttaagtgccagtcacatagtaggttgtcacctatacttctctgatagactggctgtaaattggacactcttgggtttgattaatttgctagaatggctcacagaactctaggaaacactttatgtttctcggtttatgataaagatattacgaagactatagatgaacagtcagatggactagatgcatagagtgaggtgtgggagaaggggttccaaatttctgtggcttctctggggcaccaccctccaggaacctccacatattcatttgtctggaagctctccaaactgtgttcttttggcttttcatgaaggctcactgcataggcatgattgattacatcactggccattatcccctctctccttctggaggttggggtgtggaactgaaagtctcaaccttctaatcaggctttagtcttttcagtgaccagcccccatcttgaagctatctaggagtcattttattaacatacaaaaggcactcttggctgggcgcctcatgcctgtaatcccagcactttgggaggctgaggtgggcagatcacctgaggtctggagttcgagactagcacggccaatatggcaaaaccccatctctgccaaaaatacaaaaattagccaggcgtggtggcgggcgcctgtactcccagctacttgggaggctgaagcagggagaattgcttgaacccaagaggcggaggttgcagggagctgagatcgcatcactgcactccagcctgggtgacagagtgagactccgtctcaaaaaacaaaaacaaaaaacaaaaggtactcttatcattctacagaatccaaggcttttaggagctgtgtgtcaggaaaggagaggaaaaaaatatattcacagtattataggaaatggtatgtataagataatattgagtgaaaaaaaatcaggttataggacagtgggtgtatgattttatctacgtgaagtgttttcctccagcatattgtcttgtgtattgttttgtatatatcctgtacagacatgattctggaaagaagttcacccagatgttaacagtgatacaataagtggagttttagtagaatttgaaaattttatgctatacatatcttagctttagaattacaaaatagtggctgggtgcggtggttcacgcctgtaatcccagcactttgggaggccgaggtgggtggatcacgaggtcaggagatcgagaccatcytagctaacatggtgaaaccctgtctctactaaaaatacaaaaaaaaaaactagccgggcgtggtggcgcatgcctgtaatcccagctactcgggaggctgaggcaggagaatcgcttgaacccggaaggtggaggttgcagtgagccgagatcatgccactgcactccagcctgggcaacagagagagactccatctcaaaaacaaaacaaaacaaaatagtttttaaaaatgttttttaaaaaatttgaaatgctatcaaatttacagaaaagatgcaagaagtgtataaataatttttttctccaaactatttgagattgtgaaccccaaatatctgagatagtctcaattaatttagaaagttaattttgggcttggcgtgttggctcacgcctgtaatcccagcatcgtgggaggccgaggtgggtggatctcttgaggtcaggagttcgagaccagcctgagcaacgtggtgaaaccctgtctctactaaaaatacaaaaaaattagccaggtgtggtggcaggcgcctgtagtcccagctacttgggaggctgaagcaggagaatcacctgaacctgggaggcagaggttgcagtgagccgggattgcaccactgcactccagtctgggtgacagagcgagactccatctcaaaaaaaaaaaaaaaaaaaaaaaaaagaaagtttattttgccaaggctgaggacacatgcctctggaggtcctgatgacatgcgtccaaggtggtcmgagcacagttggttttataaattttcgggagacatgagacatcaatcaacatatgtaagatgtatgttggttccatccagataggtgggacagctcaagtagggaggggcttccaggtcacagataggtgagagacaggtaggtgagagacacaggtaggtgcattcttttgagtttctgattagcctttccgaaggagcaatcagatatgcrtttatcttactgagcagagggatgactttgaatagaatgggaggcaggtttgcccgaagcagtttccagcttgacttatccctttagtttaatgattttggggtcccaagacttactttcctttcacaagattaagttgcagatatgatagtcccaaccccttgaaactttgtatttcctatgaaccaggataatctcctatataaccacaatataaaactattaaaattaaaatgttaacactgatacattactaccagctaattctcagaccccattcaagttttaccagttgtcccaataatttcctttactgaaaggatttagttcagtcctgcatttatggctatatctatttaccctccttcatcctggaacagttcctcaatctttcctgatctttggaagattcagaccagttatttggtaaaatgttcttcaatttgagtttgtcttgaagtattctcgtaatttgattcaggtcttgcatctttgggaggaatatcacagaagtaatgctgtgttcttattgttacattttacaggtggcacatggttttcatttgttctgttactgatgatattcactttggtcattcattaaggtagtatctgccagggctctccactttaaaattactctttttttacccctttgtaattaataaacattgcaaaatattaggaacccccatgttgatttatttcattactgctgatgttaactttccttacttggttaaggttgtttttgtcactgtaaagttacaggttttcctattgtaattataaatatcttattaggagataccttgaaaatatgtgaataaccagtgtactcagcaaacttttacccactagtttagcatccattgatgattcttttctgatcaattattattatgatgcatgccaaatagtggctttctaattccatcatttctacttttattaattggctttctacttgaggaagagctttctctcctctcccatttacgtatttatatatatataaatttatatacacatatatatatgtaaatacatacagaatacacactgggtgtattcttacattcttattttatacaacaagatacattcctttactatcataatttactttgatgcttaagttttccccgatttggctagtgggagcctcttcaagctgcttctgggtccttattaaatgccgcatgtttgcttaaatacttcctttctggtatagtaagttgttcagggctcatcttatccttttcctgctctggacctgaaatgaaaccacttaggagccctgtttccttttwgccttggttctaccaagaagataatgcttcatgtgcacccttaccctgggtgtcattaattctaggtcccagcggatggagctaagaagaagatgtatgtgcatatatatgtatctatagatgtatataaaatcataagtatatgtgtgtgcatatatgtctgcatactccaatatgcatctatatctctattaaaataaaaaaaattttatattaaaaaccaatgtttctttcaggtatgttcaattcagtaccacagggtttattctatccttcccacttttccatatttgtaactcattctctatgagaaacctgctcccgttatcaaatatatttacttatttgctcagtcctagaatatatagaatagtttcagagtttctagctcatacctctgttagaaagaagcttaggagttagagcccagtatttgtttaatgttctgagaatatatagtacaaaatataatgttcaaaagttaagtgggttattcccctccactgcccttagtgtgattatgttattctttgctgtaagttttatttgtatcttctagtaaatttcttaagaagacttaagagtacagaatttcttgggctgttgaatgtttaaacttttttcctgtggttctgatagttgaagaatagcttggttggatataaaaagctttggttctaatttttttttcctggaggttttggaaaatgctttttcattattttcttaccttgatgtgtgtgtgtttttttttttttttaaacagagcctctgttgctcaggctggagtgcagtacgtgatcatagcttactgcagcactgcaacctcaaactcctggtctcaagcagtcctccagcctcagactcctcccaagtagctgggactacaggcccatgccactatgcccagctactttttaaatttgtagagacagagtcttgccatgttgcccagacaggtctcaaactcctggtctcaagtgatcctaccaccttggctgatgttttttgagaaggctgataccagccttattttcttgcccttgtaaattatttgatcattttgcttcaaggtcttgaggaattttttttttatcttgtagggtttttgttgcaggttaattttctctagtatgtggtaggccctctttatatgtattttttcctataaagttgtcttatagtattttttcctataaagttgtcttatagctttaaatagtagttttgttccattgttttattttatttaagaactcccggccaggcgcagtggctcatgcctgtaatcccagcactttgggaggccgaggcaggcggattacctgaagtcaggagttcgagaccagcctggccaacrtggtgaaatctcatctctactaaaaatacaaaaattagccgggggcggtggcacacgcctgtaatcccagctacttgggaggctgaggcaggagaattgcttgaacccgtggacagaggttgcagtgagccgagatcatgtcactgcactccagcctggccgacagagcaagactctgtctcaaaagaaaaaaacaactgccgttatatataaattgactcttctttgcttgctttttatttcagccatctttttatttctttatttcattttcattctcttggtttttttcttttctttagtgcctcttaccaagttttcatttgaatctgtagtcgttcttctaggcctgctgtttgtttccctcttctctcttctgtgtacttcttcccaaactgcccttgatctttttggagaattgcaatgagagcatgagagatacagttcacggggatttagtggcttttttttccctccagttgtaggaaatttgaagtttggatgttctttgtgtcatagttttatgaaagtatctgtatatagttttatttgctcttttcttcattttttcagctttacatgactgctattatctcaaatacccagaatgaagagagtatttttgttattagttaagaaagttatagaagtaataatcataccttgtgaaaacattcaaacaatatgcaatggtatatacaaataagtagaagacaactttccttgttctctagatttgttaaccatatgattttattttattttattttatttatttattttttagatggatttttgctcttgttgcccaggctggagtgcagtggtgcaatcttagctcactgcaacctccacctcctgggtttaagcaattctcctgcctcagcctcccaagtagctgggattataggtacccgccaccccgcctggctaatkttttgtatttttagtagagacagggtttcaccatgcttagccaggctggtctcgaactcctgacctcaggtgatccgcccacctcatcctcccaaagtgctgggattacaggtgtgagccactgtgccaggctaatcatatgactttaaaaattatcatgaagtttatatcgtttacattctgttctgaagctgtagtgtaggttgaaaaatgtactctattttgtccaataaccacttatagaaattagagataaaatagcctttctaatatgacaatacaaatattaattgtggaataaagtagagcgattatacacagagaaggatactttcatatgtaaaagtcataggatatcttttacatttttttctagatcctgtcacttcctttggatcatacgcagttgctcttttgtttcttataagtattctgagttcttctatattcaaacattaaaaaaaaatggccctctcatttcattggtagtttgggtggctatagaattctagtttcaaaatagtcttcacttggaaattcaagtcattcctctctagttttctgacatagacatacagtttattgatgataattggatgtagtctcgttctttttttaggaaacttattttttcactagacatttttagaatattctctttaattttggagttctgaaattttgttaggctgtatttaggtttgattttttctttctttaattacgtttggttttggtagaccctttaattctgaaaaatattgtcattcttcagcttaatttatttctctttctattctatatttgttacattgatgctggacctctatatctctttatatatttatttttttcctcatatctttctttgctcctatttatatgagatttcctcagctttgtttcccatatttctagctcagccttcagacatgctttttggcccatccattgaggttttaaaaattttcttaatgcttttatttccagaaacttttgagagttgtcatgtttgttgtgatatccattgtaacatgtgcttggttctgtatctctcagcctctaattttcatgcaaagacccttctccaggcagatggcctgctttctacagagagtagttcttaggaattgctgatggcagaatctgtcatcagctgctgtatctggaggtatagatacacactgtttcttctttggttcattgctgctttttgtattttttgactccaaatatggagctttttggkcatcctcctttgggaagatctggggcttacttttgatatctgtgatgtgtttcgttgattcttttgataatccagtacaatttattgtttgaattcctcaaaatttctgatctactgcttgcattatttcctatctttaaattttatgtactttttgtttttttttgagacaagagtctagttctgttgcctaggctggagtgcagtggcatgatcatggttgactgcagcatcgaactcctgggctcaaccaatcctcccacctcagcctcctgagaagctgggactatagcatgtcccatcatgcccaactgattttgttatttatttatttttttcagacaaggtctccctttgttgcccaggctgatcttgaactcctgggctaaagtgattctcccaccttggacccccaaaatgatgagattagaggcatgagccacagtgtctggcctatttatttatttttaattttactttattttattttagacagtgtctcactctgtcatcctggctggagtacagtggtgtgatcttggctcactgcaacctccacctcctgggttcaagcaattctcttgcctcagcctcccaagaagctgggattacaggtgtgcactaccacacctggctaatttttgtatttttttaagtagagacagggttttgccatgttggccaggctagtctcgaactcctggcctcaagtgatccacctaaaacaacttttctcttatttcattgacatcttgtgaggaaggggaagtagattggggtattcaatccattaacttggactggaagtgtaagtcatgcatacttttttttctctctctctctctctatctttgtctctctttctctttctttcttttttttgacagagtcttaccgtgttgcccaggctggagtgcagtggcacaatctcggctcactgcaacctccacctcccgggttcaagcaattctctgcctctgcctcccaagtagctggaattacaggcgcccgccaccatgcccggctaattttttgtatttttagtagagatgggttttcaccatattggccaggctggtcttgaactcctgaccttgtgatccacccgcttcggcctctgaaagtgctgggattacaggtgtgagtcaccgtgccgggcctctttcttttttttttttttttttttttttttttgagatggagtcttgctccattgcccaggctaaggtgcagtggtacaatcttggctcactgcaacctcaacctcctgggtcgaagcaattctcctgccccagcttcctgagtagctgggactacaagcatgtgccaccatgcccagctaatttttatatttttagtagagacagggtttcaaccatgttggccagactggtttcaaactcttgccctcaggtgatccacccacctcagcctcccaaagtgctgggattacaggcgtcagcmmctgcgtccagcctctattttttttttttttgagacggagtctcgccttgttgcccaggctggagtgcagtggcgtgatcttggctcactgcgacctccacctcccgcgttcaagygattctcctgcctcagcctcccgagtaggtgggactataggcgtctgccaccctgcccggctaattttttgtatttttagtagagatgggatttcaccatgttgaccaggctggtcttgaactcctgacctcaggtgacccacccgcctcagcctcccaaastgctgggattacaagtgcgagccaccacgcctggcctttttttttgttgttctatgatacttgtgttctaaacatcaaaaacraaagtaaaacaccaacaaaaaaatagaagagccaggtgcagtggygtgtgcttctcattccagctacttggaaagctcaagtgggaggatcacttgagcccaggagttaaagtccagcactggcaacatggtgagaccttgtctctaaaaaaaaaaaaaaaaaaattaaaaacccaaaacaaaacaaaagaagatgttcactcttccacttttctctccactcttccctgtctgagatgagttaagcaggagaaatatccatgtttatagggattaggcycatagattagtttagaattaggaatgtgctactatrtwccataggattttaaaagaaagttgttcagatacctttgtttttaaatttcattgtaaacatttgattattttatttcttagaaaatatatgcttttctcttatttagaaggaatatataaaaaattattatcagaaatgtatattcatatgttttcttttaaactcttgactttttttttaatagtgtacttttcccaacactggtgctcgtatcatgatgttcattggtggtcctgctactcaggggcctggaatggtggttggagatgagttgaagacaccyataagatcgtggcatgacattgacaaagacaatgccaaatatgttaaaaagggaactaaggtaattttgactgttaaatatttttgccttattagaaaacaggtattcatttgctggcagaagaagaatacaaatagtttttgatagaaattggtattatacagtttgatactataactggtattcagaattggagaaatattcattttttcttgataatttgttgtaatgtttctggtttgaaatatttaaacacttcatwgtacgtgtcagtaggtatctccttaaaaattattactgagagaaacattctatgcctttttaaatattcatgttaaagaatgcctttctgtttaggaaaagttgtttttacatttttcagtttttcatttccaagaggcagtccttaatttttcctttagatatgaatattgttcatagcttaaatagtccatcattttcttgtaagttgttttatgttcatctaacttcccattttttgggtttgtgtaagtacatttcactaatgttgatttttgactctcttatattcgttctatttgttaatatctcttaatttttaaattctctagagttcagttttaatttggcttgtgctgtatcatgtattttttgatagtcttcatcagtattatatgtttaaaagtaatttatgacataatttttgccactgttggtgcttttctttcctgccaactaatttcctttttgagcttggaatttttcttggttacagcttcaaaaaaggttttagattcatttatcttactgctttttgtattttctctatttttggatgtttttgttacttgggtatggatttagctaggaaagagagttctctgttgtttttctttctttttttttgaggcaaagtctcgctctgttgcccagactggagtacaatggcatgatctccactcactgtaagctccatctcttgggttcatgccattctcctgcctcagcctccctagtagctgggaatacaggcacccaccaccacgcccggctaattttttatatttttagtagagacggggtttcaccgtgtttgccaggatggtctcgatctcctgacctcatgatctgcctgcctcggcctcccaaaatgctgggattacaggcgtgagccaccacgcccagcctgttgtttttgtgctatgtttatataggaagaacaagatatgcaataggactttctttaagtttggcttcatttaggggtttatctagaaagagtggctttcaaggaaaatgtgaaaatgtcagactcacagaagttgttgtataattttattaacattacagaaagttaaataactaatcataatttaaattatgagttactcttttagtccttagatcattttgatctgttaatggaaaaaagatttataggacaattttgtatattattttaattaagaaaatcttttgtagcattttgaagcattggctaatcgagctgctacaactggccatgttattgatatctatgcgtgtgcattagatcagacaggtctcctggagatgaaatgctgtcccaaccttactgggtatgtatttaaatttttacagtttttgtaattataagcaaatgatgacatttactgatataaaccaataatgaccatttagggaaaagtgtcatcttcccactacttcaaggcaacacatctgttagtagtttttgatattcctttcagtaaaacacacttttgaatttgtttaaaaatatggagttataaaggtccaaccctgtttctaaagctcactttgatatcttgaagtcattattttgatttattacttcaacagcatttttgagataaaattcacataccataaacttaccatttaaaatgtacagtttgatgcttttagtatatttacaggatgcacagccatcaccgtaatttgtttagaacatttgcattaccctagaaactatgttcccattagcagttacttcccattattccctcctttttcttctcaccaccctctcatccttagacagctgataattgcctgttctggatattttataaaatgaaatcagaggctgggtgtggtggctcacgcttgtaatcccagcactttgggaggctaaggcaggtagatcatgaggtcaggagttcaagacaagcctggccaagatggtgaaaccctgtctctactaaaaatacaaaaattaggtgggcgtggtggcaggcacctgtaatcccagctactcggtaggctgaggcaggagaattgcttgaacccgggtggcagaggttgcagtgagctgagatcatgccactgcactccagccttggcgatagagttagactccgtctcaaaaaaaaaaaaaaaaaaaaaaaagaggaatcagagccgggcaccgtggctcccaactgtaatcctagcactttgagaagccgaggtgggaggattatctgaagtcaggagttcaagaccagcctggccaacatggtgaaaccctgtctctactaaaaaacataaaaattagctgggcgtggtggcacgtggctgtaatcccagctactcaggaggctgaggcaggagaatcacttgaacctggaggtggaggtttcagtgagccaagaagattgtgccactgcactccagcctgggccacagagtgagactctgtttcaaaaagaagggaatcaaatggtctcttgtgattggtttcttttactcagcataatgttttcaaggttcatccagactgtagaatgtactaatattttattttattttattttatttttactgctgagtaaaaagggaacaaggggctaaagtgcatttaatagtattccawttgatggatacaccacattttgtttaggaatccatcagttaatgaacatttcatttccactttttggctactgtgaataatggtcctttgaacatcgtgttcaagttttggtgtggagattatgtttttgtttctcttaggtatatatctaggagcagaattgttgcatcacatagtaatctgtccttaacattttgaggaactgtctaacgattttcccaagtaactgtaccaatttaaattcccattaccaaagtatgaggattccagtttctccacatctttgtcagcacttgtcgttgtctgtattttaattaattttttttagatggggtctttctctgttactgaggctggagtgcggggtgcagtcatagctcactgtagccacaatgtccagggctcaagcaatcctctcacctcagcctcctgagtagctgggactacaggcacatgctaccacacctagctaattattaatactttttttttgtggagacgaggtctcactttgttgcccaggctggtctcgaactcctgggctcgatcctcctgcctctgcctctcaaagtgctgggattacaggtgtgagccaccgtgcccagcttattgtctgtctttttgatgatatctgtcctagtgggtgtgaagtaatatctcattgtggttttcatttgcatttccctgaagactaatgatgttgagcatctttttatgtgcttactggccatgtgtatatctttggagaaatgtctattcagattctttacccatttttaatttgggctattgattttctttttattgagttaaaatagtttgttatttggatataaatccctttatcagatatatgacttacagatattttctcttatgggttttttccctcacttttttttttttgagacagagtctcactttgtcacccaggcaagagtgcagtggtgcgatctaggctcactggaacttctgcctcctgggttcaagtgtttctcctatcttagcttccccagtagctggaattacaggtgtgcaccaccacacccgactattttgtatttttagtagagacagggtttcattatgttggccaggctggtctcgaattcctgatctcaagagatccacccacctcggcctcctaaaattctgggattacaggtgtgagccaccccgcccrgcctccctcacattcttgatggtattgtttgcagcacaaaagttttaaattttgatgaaacctatttcatgctttttctttcttttttattttgagacggagtcgctctgtcacccaggctggagtgcagtggcgtgrtctcggttcactgcaacttcttcctcccaggttcaagygattctcctgcctcagcccaagtagctgggactacaagcgcctgccaccacgcccaactaatttgtttttgtatttttagtagagactgggtttcaccatgttggccaggctggtcttgaactcctgtccttgtgatctgccttcctcggcctccgaaagtgctaggattacaggcctgagccaccgtgcccagccttgattttaaaaaattttttaatttttaaattttgagacagagtctcactgtgttgcccaggctggagtgcagtggtgcgatctcagctcactgcaacctctgcctcccaggttcagcagattcttgtgcctcagccttccaggtatctggattacaggcatgtagcaccatgcctggctaattttcatatttatttcaagttatctgcccgtcttggcctaccaaagagagctgggattacaggcatgagccactgtgcccgtccaacaattgatttttatatgttgattttaccccctgcaaccttgtggaacttgtttattagttttaatagtttttctgtggacttcttaggattttccctatataacatcatgccatctgcaaattggtattgttttacttcttccttcccacctgcatgctttttcttttccttgcctaattgccctggctggaatgtccagtacaggattaaaaatgtgagagtgaatatccttgtgttgttcttgatcttcggggtaagtcgtttagtcttttttttttctttttttgagatggagtttccctcttgttgcccaagctggagtgcagtggcacgatctcggctcactgcaacctccgccccctgggttcaagtgattctgctgcctcagcctyctgagtagctgggactacaggcatgcgccactacgtccagctaatttttgtatttttagtagagacggggtttcaccatgttggtcaggctagtctcggactcctgacctcaggtgatccacctgccatggcctcccaaagtgctgggattataggcatgagctaccgtgtccagccctgtttagtcttctaccattagaagatattagctgtggatttcatcagattgaataagttcccttccaaaaactctcatgaaaatgtgtttttgggattttgttaaatgctgtttctatagctattgatatgatcatgtgacttttgtccttattaatatggtatattgcactgatttttggattttaaacctaccttgcatttctgggatgaatctcacttggtcatggcgtataatcctttttattattgctaaattcaatttgctgtcattttgttgaggatttttgcatctgtcttcataggagatactggcctgtagttttcttttgtttggtgttggcatcagggtaactgtcgtcacagaatgacctgggatgtgttctttcctcttccatgagcagttattatttttgaaataatttaattaggcttaaaaatcaattagatatgtcaacactttctcaggtttatttatttaattcattcatctaataaatatgaatgagcacctgctatgtagccaactgctcaaggcactgcaagtaaagcagtgaactaaacgtaaaaatctttgcccgcatggagcttatcttctagcgcagggctcttccgtataatttcgcaatggatatattctttgtgctgtcccattgaaatgtggcaagtatgactgaggaactaaaatttaattttaattgctttacatttaaatttaactagccacatgttagtacagttctaatgagaggagataggataagtatggtagataggatgtcagatggtgatagcattgggaagaaaaaagttcaggaaagaagaattggggtttgcagttctaaataggatgaataggcagagccttattgaaggtgatattttagcaaagatgtaagcaagtgagagtgagccatgtgcatatatgaagtaagagtgttccaagtgaggaatagcaagtacaaagttgagaatgtacctggggccaggcgctgtggctcacacctgtgtaatcctagcactttgggaggctgaggtgggtggactgcttgagctcaggagtttgagaccagtctgggcaacatggtgaaaccctgtctctaccaaaaatacaaaaattggctgggcatggtggtgtgcgcctgtggtcccagctacttgggaggctgaggtgggaggattgctggagcttgggaagtcgaggctgtggtgagccatgatcgcatcactgcactccagcctgggtgacagagtgagacctgggctcaaaaaataataataataaagagaatgtacctgtgatgttgagaaatagcaaggagaacaaagtagctggaatggagtgagtgaggagggtaggttacaaagtccgtttacctttttaaagggctttggactttaccttgagtgagatgggaaggcgttggagagttttcaacagaggagttttatgatctgacttaatagtttaaaaggatcgctgaattcatttgtcatttgtagagtatagggatgtaagaataccaagtgatggtagcacagatggtgggaagtagttggattttggatatatttggaaaatagatgtaagggtgtggacaattccttcatagaggtttactgtaaaagggagcagagaaatggggtggtataaattgtcattaatctaggatgtattatcaggtataatgatgacttagatcatcatagataacatgtttgtagaaaatctgaaagaatttataaactattggtattaatatgtgaagttggcaagacttctggatcaaggtcagtgtacaaagtttaattataaatttatgtaccagtaacattaaaaaatttaaaaggatacaatttctartaagcatcagagataacaaaaacttctaataatatcaaaagtaaaattatggtcaattagttataacacatcagttttattcttttgcctattttaatttttgattgtatcttttattgatgtttaatacttaaaatattttaaaaatgtgagcaagtgtatctaaatatttgtatgcatgtgtatcatataaacaatattttatacatctttcctctctttgtgtttttcacttgtatcctagaaatcagtctgtagcagtgtattactccattgtgtggatgtaatattttttcaactagtctctaattacatgattatttggattgttttcagttttctgttattctgagtttgtgtttgaaatacagtatttcaaacacaagggaaaaaggaaaaaaacttttgttgttacaaatagtgcttcagcgaataaccttgtgaatatattttgtttttctgtttttgttttgttagagtatctttggaatagattactattagtggggtggctggattaaggaggaaatccatatataattttgttagatattatcaagttactctgtactggggttgtaccattttgcagtcccagcagaagtgtatgagagtgcctgtttttccatagcctcaccaacataatatgttgctgtcaaactgatttttgccaatctattagagaaggaatggtatcaaaatagtttttaactttcaagttaatattaaaatttttttaattaaaaaagtaggtatatgcttattaaaaaaattaaaaataagtgcaaaaagtgaaaatactctcaattttcttccattctcatttgcttggtataacatgtatatttcatgtgacacagatagtacatgcatatacatacacacacatacttgtttttaagagtgagaatgggccaggtgggtggctcatgcctgtaatcccagcaccttggcagcccgaggtgagcatattgtttgagcccagaagttcaagaccaacctgggcaacatggcaaaaccctatctctacaaaaaaacaaaaaaattagctgggcgtgttggtgcaacctgtagtccagctacttgggaggctgaggtaggaggatgacttgagcccaggaggttgtggctgcagtgagccgtgattgttccactgcactccagcctaggcaacagagtgagaccctgtctgaaaaaaaaaaaaaaaaaaaaagagaatgcatgctggaaactgtcaggtacctttaccaatatggagaacatttgttactatatactcttctgtaccttttgaattttgtaatatggtggatatattgcctatttaaagaagaatttttttttaaattaccaaggacaaatgcaactgttaggggtactctgttaccttcggaattgagattatttgtggggtgaggatattctcatatatatttgaatattaaaaattagtaatacagcacattttgggaaatatctttaaaatttattggtagttttgagaggtaattttcttctacgattttaacacacggactcagtaactgtgtcaagtatgttgtttttttgttctttccatgcagaggatacatggtaatgggtgattctttcaatacttccttattcaaacaaacttttcaaagagtctttaccaaagacatgcatggacagtttaaaatgggctttggtggtacgctagaaataaaggtaagaaccaaaacttgacatgtgcgatatgttatcaaaagacaacttataggcttgagtgtaattctaaaatgccattaatcaaatttaatatttactttcaaaattgtggttattttatattgaaacctgagttagagattttcttcaccagaagagtgtcatcattcaatgtgtgagactttacttgagcatttctgaacaattgttagaaaagtagaacaatattggtaaaatattctttaactttttaatttttttctttatatagggcttagctctttaaagtatgttttatcttcttttttttgagacagagtcttcctctgtcgcccaggctagagtgcagtggcatgatgttgtctcactgcagcctccgcctcctgggttcaagtgattctccagcctcagcctcctgagtagctgggactacaggtgtgtgccactgtgtctgtctaatttgtgtttttagtagagacgcagtgtcaccatgttggccaggctggtctcgaactcctgacctcaggtgatctgcctgtctcagctttccaaagtgctgagattacagacatgagccaccacgtctggcctgttctatcatttgtagagccaaatctatttatgttagtgctaggttaatgataggaattgttatctaacttaagaggaaactgtttttttttaaaaaaaaaaagaggaaactgttttttacctttcggataatcagtaattgttttatgattagttgttattgcataattctatcatttatttcaaatttggatttaaaatacccaaaggctaagtgcttctaatcctaattgattcttattaaattaactctaagcacattaattttgaattttcattaaatatttattaatcttgttttattgaatgcttgctatatgcccaacattgcttgggaaattacagagatgcctagggatatctaaggtacacgtcttgctatagagaaacttagcattctcttgatagagaggcagggaaagaaaacactgcatgtaatagaatgacataatggtaaattataaaaacactataaaggtttagagaagaaaaatgaacatatataggacacaatttattctagacttctagaggagtgtgacttatagtttttttttttttttttttttttkttttttttttttgagatggagtttcgctcttattgcccggctggagtgcaatgtcatgatctcagctcactataacctctgcctcctgggttcaagcaattctcctrcctcaccctcccgagtagctgggattacaggcatgtgccaccatgcccagctaattttgtgtttttagtagagatggggtttctccatgttggtcaggctggtcttgaactcccgacctcgggtgatccacctgcctcagcctctcaaagtgttgggattacaggcgtgagctaccgcgcctggccacagttgtttttttaaagatgttagaggatattgcattttattcaggaacccagtgtgaggagaggcatagaggtgagaatcagcattgtatgtttgagaaaactgcccagtgagagtagatgctttgtatttgaatgaaaggaaatagcttaaatttgtgggagctggctgtagtgtggagacacatgtgtaggcagaagtcattaggtattttgggtaagattcatctgacagtggtattctgcatatgtcaggaaaaagaatctcaagtaagaaaacaaaagtaagctttccaatttttttttttttagacagaaggtattgtgatagcttacattttggtggcaggagagactggggggagaccaatcttggtgacagattttctatgggaggaaaaatagaatagggtgtctaaggttttagattaggatatgtgaattttgggtgggtaggtagaagtgtgaagtcaggatgaggttcccaaatggagacctcgtatgtgctaatggaaatagaaggttaacattaggttggtgccagattttaaatttgacagtgagcatagaagtgcttattgattgattatttttcatgttagtatattttcattggctttgagttttaaatatagatgaatatcttatattcttatacacctgtagttgaacatttgaacgtatctttgaggaaaccgaacatgctgtattcttattttgcagacctcaagggaaataaagatttcaggagctattggaccctgtgtgtcactcaattctaaaggaccctgtgtgtctgaaaatgtaagttgtgtttattctaaaaagaaaatacaggaccaggaactgtggcttgcacctgtaatcccaggtacttgggaagctgaggcaggaggattgcttaagcccaggagttagagaccagctcaggcaacatagagagaccctgttcccctcctgttatccccccaaaaaagaaaaaaagacacagcgaacgcacaggacagcaccaataaaaacttggggtggcagcctatagcattcctttcaaaattcttatattgattgttttaggtagttcagctcccattggtatacctctattcatggttgctctttctgcatacccttttcccatccatccctaattaaaacttttgtactgtcaccagtcttctattttttatgcctaaattatgtcttgccccagtgtgcctaaaaaaaaacaaaaacaaaaaaaactcatgatttggaaatttggagacttctgaaagtcaaaattagctctaaattgatttttgataccagaattttcaaaaragtaaccaaattagccagatttggaatttcagttctttatgttctttttatccaatttaatggaagtataacgtactctaaaatggtagaatcatrtagctgtggagaggatgatgggacaaataatacaaagtgrgtaatcaactttaaaaatgacaaagctaaaaaattaatatgtacaagcagtttgcgtggtaaaggtctgtctatatctatgacgttttcttgggaatcagagtgcttaacaattctcatccagagaacatgtgttcgtaaatgcatatattatatgttaaatcagtttctctttatacagatcaagtagttggatagaaggataatgttagttgcaattacttcattaaatagcatatacttttattttttattttattttttttgagacggagtctcgctttgcctcgcaggttggagtgcagtggcgccttctcggctcactgcaagctccgcctcctaggttcacgccattctcctgcctcagccttccaaatagctgggactacaggcgtcygccagcatgcctggctgattttttgtgtttttagtagagatggggtttcaccgtgttagccaggatggtctccatctcctgaccttgtgatctgcccgcctcagcctcccaaagtactgggattacaggtgggagccaccgcccctggccaaatagcatatgcttttaaagagaacagtatgaagaacttatattaatacttttgtaatttacttagcaagaatttaaattttacttttattatgtaaaaattattttattttttattatgtaaaaatgctttattttataatatacttatggtcttaaaatattttaagctcttaacattgttgaattagtttgaaacatgacttttttttttcctgtggtctttttccattttcactttaatataaaattaataaattgtgtctctagctttcaaacatgctatattttatttttacaggagataggaacaggtggcacatgtcagtggaagatatgtggacttagtcccactacaaccttagccatatattttgaggttgtcaatcaggtatgactttctacatctgaatatcaaaacgtacaacgtacatttgaataagtacttactttaggccatgaatagttcatattttttttcctatagtagatataacccaacatttattttctgtattggaatttatatttgtcgttttttatttttcaaggctaaactccttggtgagagtacatattgtaatagaaatgcagggaaacctacaaacgccaaaccttgggtagcccaacttttagtctgttttctttctttcttttttttgaatataaaattgaaggataaatgcagttatttaaaattcccttctagctacacatttttgcaattagatgtctagcttttcctagttgtcagaaagtatatatgacatatgagtctttgtacaagaaggtctaatatgtcaaaatccatagaaaaagtttggaaagtaatcgtatttgggaagatttttttttctgccacaggagataattaatcacattgaagaataacacaaattactgacttatttattaatagtttttaggcataaaatgaaccacaaaatattaacagtcagctttcctaaggcaggtgcaatagtttttttttaaacattaaaatttataagaaatatattgactcttattgacaaaaacaaaacaacacacaaaaacaaagcaagaatgtctgttgtcagaatgcaggaataaagttttcctattgattacttgtatttctttctgatgataattattatatattgctattagtttcttctcattattaatctttcattggttggttgttcatcatatgattatgttcctaaaagttctgctttcatcttctatacctaggggaggaggacttagctcaatttctgtttatctagttacaagttgaacatctcagatctgaaatctgaaatgtttcaaaatctggaactttctgaatgctgacatgacactcaaagaaaatgctcattggagagcattttggattttggatttttggatttggggatcttcaattggtataaggcaaatattcctgagtttaaaaaaatacaaaatccaaaacatttcgggtcccaagcattttggataagggatattcaatctgtgcagtttggcttaaatggcttcacttaggaattgtcttttaatttctttgtgctctcccttttctttgttctttcatgtccctctggcttatrtattacttgaaaattgatttcctagcaggactgacttctrtcattcttgattattttcctcctctccaaattaatttctyctcttctgtgtaacaaattataactgttttgaatgcactggaaataagtatccttctaatcaattttagaatgaattatttttagtgctaggacatgtagcctgtgattatatgacaacagcrtagtaaattttgcttaggttttactccattatatttatacagcataatgctccaattcctcaaggagggcgtggtgcaatccagtttgtgactcagtatcagcattcaagtgggcagagacgcatccgagtgaccaccattgctaggaagtaagttgtatttgttagagatttgattttcatatcacaggtatctgggttgtgtttycaaactggattcctattttgggtgacatccatgactagcaagtgaatatttgtgactaatagtattttatttatttctttctaacccagcttatttgctacaatatgcattactaagaaccgtaagagcaattttaaaaagtacttctaagacacacccttcaaaatattattttatttacctcattcctgtgagaggagaaaaatcagatatttacctataatagtcaataataatatatataatccattatatatataaatgatatagcacagtaattaatcacattacttttcaattagtgataaaaattcttagctatttttttttcaagttttattagtcatttaattcatttattatgccattactcagcttctgctttgtggagtaggttctgttttaggagagtatgaatgcggaagccgtgaacgtacttagcctcctgctgtatgacagtgtggtatagagtcatcctcacattgtctgtggtaaagggccagttgtgttttttttcctaatccttcgggtacagatgcttttattaaatacaataaaaatgaattactagaaaaatgaaattttaaaaagtgatttaaaacaaactccctgttttatattattagattaataagatataagattattttgtgaagttgctcagtttctaaatatttattctcagttcctcttttgacttcatggcactggttcacataccacactttgactagcacttgttgagaccacaaaaggtaaagtctctatctaacagattcaattatagggtagtattttgtgtaacatagtcatgttctaatttattgatataggcagggtccccagaagggaataataaggcccaacagataccttttcttattcctatctttgtgatagattttccaaataaggcatgtatttgttcatgggctctttgcccagcatttgcagagacaacaaatttaactgaatttagtacctttctttttattaagaattacgaataaattatttctctgctactttggtatctctgtgtatttgtgaagtataaaacaaaaggaaaataattgtggaatgagtttagttaggaagaggttttttagatgaggtgaatctagaaatgaacaggctttggtctttatttctgtttgtcttgaacttggttgtctggataggaaaagtgttgatcagtaaacttacccagtttagtcatggtctcgacaatggacaaggaaggcatttgtagctctcattttcattaagtgtacttaaactctagcttcattcctgaaaatcttaagacttttgttgagtgatggacatgaacacaacatttgaactgagtattagctgtattgggtgatctattacttagcacagggttgtacatagatttagtgttctgttctgttaccttgctttgacttaacatcctggaacaatgtcaaggggatacattattcatttgaagaaaaaatgtcagctgaaccttcccttagatttattcagatttcagataaggaacttggaagtactgatgcttggcaaacttctcagtttatttatggctctcaacgtgtgtgmacacacacacacatgtgtgtgcacacattaaatttgacattcagaacatttgcttaaggaaacaacgacataccaaatgaaggactttttacaacttacaaagtcactggtttgtactattcaaaaatgtcttggaagacaaagaaagtctgagcaactgatccagattaaaggatactaaagaaacattaccactaatgccaatgtgtgatcatggacaaaatgcaaatgtcagggaaaaattttgctttagaagccattattagacaattggggaaatatgaatatagtctctttctatatgataatggcattatatcagtgttagatttcatgagtttaataattggagctatataagaaaattttttgttcttaggagatatacactgaagtatttcaggcagaaggtcataatatctccaacttaatctagaaaagttcagcaaaaaatgtgtatataaatggagagagagaatgataatgcagatgtgttaaaatgctaacaactgatgaatctaggtgatggttatataggagtttattccactcttactgtctttatgtttgaaatatttttaaaatgaaaattttaaaaggttaggtgactctttcaagagacagggtgctgtcttatgagaaatattatgggcttatatattttcagtttgcacagaatttatgaggctatttgtagagacatatgtgtgttatggtgccatttatagcattgtgtcttaccaaaagcatccgtcttttcaagttaacttatcccaaccatttccaatgatcagagcaccttgttgttttttttttttttttttttttttttttttttaaactaggactatgactttaggggcctagacaagtgtttttgttaagtgaataagccatatgaaaataaaggctcctgagaagacaaagttactctatttttcatgtacaaaatgactttgatctaggaattttggtttaaactagttgtaagaatcacagtgaagggatacgggaaatgtagaagacagatttttacaatgtcaagaagccctttaaacttgactttaagagcccaccttttaatttatgtctaaacaaataataattagtaaatttgcatgtgttcacttggaatgtatttcctctcctgcaccattatattttcagaattaaaaaagtcacctttgtagttcagtttaaagcaaataaataccgtcattcaagtttagaaagtattgattcaaacagtgttgttttaaattctttgatttttaaaattaaaactaaaataattaataaaacactaaaccaaactattagtataatcatgaagtctttaaattgcattaaaacataactttcaaaattaccaatgtcttcttttacacattctcagtcttttttgcttcttactgtttactacactgagataattcacacgtttcaaccatctgggaaacatttaataattattttgcttattgaaagaaaattaaaaatacagaaagaaggccgggcgcggtggctcacgcctgtaatcccagcactttgggaggccaaggcgggtggatcatgaggtcaggagatcaagaccatcctggctaacaaggtgaaaccccgtctctactaaaaatacaaaaaattagccgggcgtggtggcgggcacctgtagtcccagctatttgggaggctgaggcaggagaatggcgtgaacccgggaagcggagcttgcagtgagccgagattgcgccactgcagtccgcagtccagcctgggcgacagagcgagactccgtctcaaaaaataaaaaaaattaaaaaaaaaaaaaaatacagaaagaagggagaagaattttaaacatgctgctgcctgaattcccttaggatcactcatcactcttacatgtaaaagtggttcagcacttattttcaggaagtctataagtatgtctggccagtcactatatctgaaatattaaacaaacaaacaaacagataaaatgtattgctgggtctacctaggttcagtttgatctgagtctacccaggatcagttggatttatacagcatttggatttaataaattgctgctattttatgtgtagtatcaaattaatcccttagactgaagtttttacttattaacttttaattggttttagtcagtgtattaacatggaaataaaagaatacaaagtaattttaattatttgatttttatcactaatgattgaaagaccaatgagaaacttccgacactttattcattttccagtggaataaacaagaattacttaggttgagagaaaacctttatttttgtatttctatatttctgctttaacaaaattaaataaatgaaattttaaagttggatatagggacttgcatatctatgtgtgtgggcacacgtatatcctattgtttttacttgtaaaaatcttttattggccaagtgcggtggctcatgcctataatccgagtgttttgggaaggctgaggcaggaagatcacttgagtccaggagttggagactagcctgggcaacatagtgagaccctcacctctgaaacaattgttttaaattggctgggcatggtggtccgtgcctgtagtcctgctgctcagaaggcggaggtgggaggattgctggagcccaggagtttgaggtgaatcatgattgtgccacttgaaccatgatcatgccacttcattccagcttgggtgatagagtgagaccttgtctcttaaaaaaatctctgttttttaaaaacttccttattttatgactttaaagtttttttttttttttgagacaaagtctcgctctgtcgcccatgctggagtgcagtggtgccatcttggcttactgcagcctctgcttcccaggttaaggcagttctcatctccagagtagctgggattataggcatgtgccaccatgcctggctaatttttatagttttagtagagacagagtttcaccatgttgctgaggctgatcttgaactcctgagctcaagcaatctgcctgcctyagcctcccaaagtgttgtgattacaggtgtgagccaccgcaaccagcctagagatagggtcttgctgtttcccaggctgaactaaaacttctgggcttaagtgattctcccaccttagcctcctgaataactgggactatagatgtgtgccaccatgctgactggactagtaaaaatattaatattttaaggaatgtggttggagagctgcctttacacttactttggaagatttctttaggtttggttatatttttctgaaaaacagtgaatgctatactaaaactgctattagtgatttaaaaaaatgctaatttgagcctggtgtggtgctcacgcctgtaatcccagcactttgggaggttcaggtgggtggattgcctgagctcaggagttcaagaccagcctgggctacatggtgaatccccatctctactaaaatacaaaaaagttagccggagcctgtagtcctggctactcaggaggctgaggcacaggaattgcttgaacccaggagacagaggttgcagtgagctgagatccttccactgcactccagcctgggtgacagagcaagactctgtctccaaaaaaaaaaaaaaagctaatttgtctaagtaatattggaattttgaaatattgaagtaggctgggcgtggtggctcacgcctgttattccagcactttgggaggccaaggcaggtggatcacttgaggtcaggagttcaagactagcctagtgaacatggtgaaaccccctctctactaatgttgtgggartcaggagactggagagactagtaagtagaacaggaggattttattgagtgcactcagaaccagtggattaacatccgaagactgggccctgaacaaagacagggcttggcttatctacacacttttgaaagggggctgactagtttgaaacaagcttacagtggcatgaagcgtagtggcacgaaagctcatgtacagaggcagaacaaaggcagttaattaaactgtgacaggttcataactcaggcttatgtgtgactcctgctatgtggcccagatggctgttatctagctttgctcaagagagccttgcacaggcttatctcataaccttcgctatagcgcctagatggttgcaatccagtcccgctcaggcatgtctcatgaccttcgctgtgctgctcagttaaaacagactacttgaagttgctagttatagaaaacaggaatctgtaaactcataggtttactcatatcrtaagagaaaggaaaatttgtttctcttttccttgtgtttgagggagtgctgggagggtctccagagcacattcctttgagccctggcttcttggataatgttatcgatactttrcctgggtctgggctttgcctgttactgcctttgggatgagttagcctaatacctaaagcttgtttccttctcttgtttaattttatttttctttatttgtttaatttcctgcctcactaaaaatacaaaaaaattagctgggcctggtggcagrtgcctgtaatcccagctacttgggaggttgaggcaggagaattgcttgaacccaataggcagaggttgcagtgagctgagatcgcgccattgcactgcagcctaggtgacagagcgagactctgtctcaaaaaaaaaaaaaaatcctagtagtttctgtatcttttatcttttaaatttaaatttgtgtggtagccaactatgatattgtgggtataataattcagaagcatttctatgctttcttattgtcttcagctgggcagatgctcaaactcaaatccaaaacattgctgcatcttttgaccaggaggcagctgccattcttatggcccggctagcaatatatagagcagaaacagaagaaggtccagatgtgcttaggtggctggacagacagctcattcgactggtaagaaataaacactgtgcttttctaaatctgtatgctttcatttgtagtaaatgtttgttgcagataatctctttcaaagtacttaacagtgtatctgaaatactgtatgagaaactcctaytcaaattactgagacagtagcacagtaatgaatagtagaactcattaatctcttccagtaaactagattgccttttttccttaaaatrtaagagtgacaattatgtaacctattatttttctattcttattggctggaatgaggttagttcccaatttaattctatattattgtaacaatttttagtgcttttttacatatttcttcattgctgtggctttagttttttactttcattttaatggaactattatatgtgcatctcttaaaagaaattaggccaggaatggtggctaatggcagtaatcccagcactttgaaccaggagttcaagatcagcctgggcaacatggcgaaacccctgtctctccaaaaaaaaattggccaggcatggtactgtgtgcctgtagtcccacctactccagaggctgaggcgggaggatcactgcaacccaggaggtttgaggctgcagtgagctgtgattgtgctgctgcattccagcctgggcaacagagtgagaccttgtgtcaaaaaagaaatgaactggggtagaaaaattatgcatattaacatgcaaaatatagacaagtctgtattatctggttctagattaccaagtcgtgtgctaataaagttattagtagtgttgatttacttagatttttaacatgccagaacaccattactgtacttacattatgacacagagcacttgattaagcttagtccctttttttttttttgagacagggtctcactctgtcacccaggctggagttcaatgagatgatcatggctcatcatagccttgacttcccctgctcaagtgattctcccacttcagcctcctgagtagctgggactacaggcacacaccaccacacctggcaaatttaaaatttttttgtagagatggagtctgcttatgttgcccaaggtggtctggaactcctgggtttaagtgactctcccacctcattctcccaaagtgttgggattacaggcatgagccaccatcaccatacctggctaatttaaaaaaaattttgttgagactgggtctcactattttgctcaaggtagtctcaaactgctatgctcaagcacccctcccaccttagtctcccagagtgttgggattttacaagcatgagccaccacacctggctaagctcagttcttaatgcttcatttttacttagcaacctctggcttattctttgaaggtacttctttatgcactctagcttaaacacccttttgagaactctatttgctaagctgtcgaatttctgtgtccagtggcttttgtgtggttggtgtaggctttcatgtaattttaaaaattcttgagtgaactagacttgttttaaaaagttagccatttttatatcatcattcagaacttttttgatttcacctccaagagttttttttatactagtacctctttgaaaaaagcagcattatgacaatattacctttttttaaaaaaaaaaaaacaagaaagattaatcctctcatagggtccactattgatgggacactattagaacaaatgccaacacagttccttcaaggtggatcttttgtttccagatagatataacattaaatatattttgacccttgcttatttaggatagcagaaaagtttctctttgtagcagaaattttccttgaatttcactgttatttagaaatctgacatgacatcattgaaacctgttaactcgtcaatctgtagagaatctgttatttttcagcttattatacacagatgtctccagcatcatgtgacatgtcatcagtgctttgacttattgtactgtttttaaatgggaccttttcaatttctcagactacatcttttttttgttttgagacagagtttggctcttgttgcccaggctggagtgcagtggtgcaaccttggctcactgccacctctgcctcctgggttcacgtgattctcctgcctccgcctctggagctgctgggattacaggtgcacaccaccatgctggctaattttttgtatttttagtagagacgggtttcaccatgttggccaggctggtcttgaactcctgacctcaggtggtccacctgccttggcctcctaaagtgctgggattacaggcgtgagctaccgcacctggcctcagacagcatcttgtcctagcattttcacttactgtgattttacatattggcaatattcttttctcaacaactgtgtgacttttccttttctaggtaataagttgtactctgaaatagcttgcttccttagtttttttcactaattgtgactttgtctcaacaaatgcttcattgtttagagattctaaaagctgcttgatgtaatcagcaccttttgcttgtcaaatggctgtgatttgtagtaaagggctttttccattttgccagaggtattgctgaattggtaggttgtcacatatgacacaaaattgaacagtacaacttggattactgtcccatgtaaaacctactgattttccttgtaaaggtggattttttttgtatgtcccttgttgcatgaatacactgaaatgactcagatgattgtaattcttcagaattatcaggattctctgaagacttatgtctagaattgttctcttttatatcttttatctcacatctcaattttgagattgttttttaatttttttttttcaacttttaagttcaggcatacacgtgcaggatgtgcaggttttttgtataggtaaacgtgtgccatggtggtttactgcacagatatcccatcacccaggtattataggccagcatctattagctattcttcccaatgctctccctcccctcactccccacaggtgcccagtgtgtgttgttgccccccatgtgtccatgtgttctcatcagtcagctcccacttgtaagtgagagcatgtggtgtttgcttttctattcctgtcttagtttgctgaggataatggcttccaaytccatctgtgtccctgcaaaggacatgatctggttccatttttttttttttcgagaaggagcctcgccttgtcgcccaggctggagtgcagtggcacgatctcggctcactgcaacctcctcctccaggttcaagcaatcctcctgtctcagcctcccaagtagctgggataacaggtgtgtgccaccacacccaggtgattttttttttgtatttttagtagagacgggatttcaccatgttggtcaggctggtctcgaactcctggccttaagtgatctgcctgccttggcctcccgagtactgggattacaggtatgaaccaccacgcccggctagtcttgttccttcttatggctgcatagtatttcatggtgtatatgtaccacattttctttatccagtctattattgatgggcatttaggttgattccatgactttgtctcacacctcaatttcaaaaattgccacattatttgacatgtttgtaaaatgtaagcactaatgtaaaacagaagggcctagtaattaattaaatgagacaactgcaaaaagtacaaaattacataaacctcacagtgtactttacttctaatctacacattctacattctgcagcatttacaacagcagcagggcagttggggctagagaccagattagtcttgtggccccattttatgataatgactgaaggaagcaagggcttcctgtcatgttaaaggtatccaaaacagacatggtgccagcaccaatttggctctgtaatgcacactgtctccaaaacagtacacaaaaaatgatgtttctttttaattaaagttactctagtaagtcatcaaggaaaagaaaacatattactatgctaaattgagggaaagaaatttattagtataatttcctaggtttttgattaggaaaaaacttacaaaaagttttaatacctaaacagtattaactttttctctatttgtgttgctgttgttgtaatagctaaaaattcagcagtgaagttgtcagtacaagaaaatgaggctatcctagaatagctactgaaactaaagtgcgttatcacctaagtcatttatcacataagatactggtatccacacatgatttactgcctctattctcagtcccttgttcggatccattgtgcatccaacttcagggatctgttcatctctttctttctttctttctttctttcttcctttctttccttcttttgagatgggatcttgccatattacttacccaggctggacttgaactcctgggctcaagtgatcctcccacctcagcctcccaaggagcaggaactacaggcctgtgccactgctcccggcttcctttttgactcctggccttttctgtttcacaacttaaaattgatggctgattcatctctgacctttggtttacccatcaaccactaattgtgttctcccttcagctgcattgctagccatcctgggtaaacacttcatctaatcagacttgactcaggaaatcttctgtcttaagactattgggactttccctgcaagccaggttttctcttgctgcaccaatgggatgaaacactttagctttactgtttttacagataccgcttttgtcattaccattttcttatagaggttaggcattgacccctagggtccttttatgtggctgcctttatgcataaataattactgaattaaagaaggaattagcctttttgtaagggatgttattttcctcaggaaaatcattactgttgctttatctgcccagttttattacttctgaataactcaaatagtgggtcttggatataccttctttatgcttcagtctgttttccaccggtattagtgttttggttgggttgtaaataaggactgctcctcgtgactcaagtagttgatactagagcattttacaggtgttcaaaaaattgtttttggccgggcacggtggctcacgcctgtaatcccagcattttgggaggccgagacgggcggatcatgaggtcaggagatcgagaccatcctggctaacacagtgaaaccccgtctctaataaaaatacaaaaaattagctgggcgtggcggcggatgcctgaggcaggagaatggcgtgaacctgggaggcggagcttgcagtgaaccgagatcgcgccactgcactccatcctgggtgacagagcgagactcttgtctcaaaaaaaaaaaaattgtttttttctttttcgagacagaatctcgctctgtctcccaggccggcttgcagtggcacgatcatggcttacagagtagcctcaacctcctaggctcaagcaatcctcctaccatagcctctcgagtagctgggactrtagtcacgtgcaaccatgcctggctaattttcaaaattttttgtagagacaggatctcgctatgttgcccaagctggtctcaaactcctgggctcaagtgatcctcctgtgttggcctcccaaagtgcttgaattataggcatgagtcagcacacttggctcaaattttttttttttttggagacagagtcttgctctgccacccaggctggagtccagtggcacgatctcagctcactgcaacctctgccttccggattcaagcaattcttttgcctcagcctcccatgtagctgggattacaggcgcgcaccaccatgcctggcttatttttgtatttttagtagagatgcggtttcaccatgttggccaggctggtctcgaactcctgaccttgtgatccgcccgccttggcctcccaaagtgctgggattacaggtgtgagccactgcgcccggccacaattttttttttttttttaatagcgatggttgtcttgctatattgttcaggctggtctcaaactcctaggcacaatcttcccaccttggcctcccaaagtgctggaattacaggcgtcagtcactgtgccagcctttttggtgttttaaggcacgtgttgagcttttttgttgttatctaagagctctttatttgttgtgagagacacttagttaaaaaatatccaaatattttaaggtgagttattaattacattgggacaatgtggtgtttgtttctgaaatttagatgttttttctttggttttgtctcttggtaagtctataagtaatattataattttattctttatcaagtatctgcttcctgatgattggtaacttcttgtaaatagaatatttataggcaacagtgttagcttttattccaggaaataaattactaacacattttattttatttagtgtcagaartttggagaatatcataaagatgacccaagttccttcagattttcagaaactttctccctttatccacaggtaagtaggtaaaaggtccatattcttttcttttcttttttttccttttttagagacaggctctccctatgtcatccatgctgaagtatagtggctccatcatagctcactgtaacctggaactccggggcttagtcagcctcctgagtagttaggactacaggtgtgtgccaccatgccgagctaatttttttttttttggtagggatggtttcctgctatgttgcccaggctggtcttgaactcttagcctcaagcagttcttctgccttggcctcccaaagtgctaagattgccacatccagacagacccatattcttttcttgtgtggccagtagcattgagcctcatttttccttttttattgctctttttatggtatctattttattgggttattctttttgttaggtaagttttgggatagctaagaaattaatattgtgctacgagtagttggtgaaaagtatataatatttttatattggccttgcaaatagtcatttatttgtggtgaatagagacttattctggaaccctgcagtgggtagaattacatgtaaggctggttagttttccatttgacataaggggacctaattatagtggtaccagaaggacttcatctgaggttattttaccagttagctagtcttgcagtatggtatcatcacctgagaacaattttatggggccagaccagataaatagaaaataaactcatttgatttaccttacagaatattttccacctggagcagtggaatctatccctccatcttcctgttgatttgatagatatttttaagtctgtgtgtttagagtgctgtgtgcagggaactttaggaggatacaggtgactgacatggatccctcttacaaggagcttttaaaagggtgagatgtgaaatatacataaacaacacagaacagaaagtgagaaatatacagaatttaaaggaaacttaaaggagtccttccaaatggatgattttatatatcttttgaaggaggaggtggccttttagcttaacttggaaggatgattaatattgagatgtggaaattcatatttttgcccatgagaactttgtttaaagcatcagctttctttttcagagctgctctgtttttttttttgttgttgttgtttttgttttgaggatcctttattgctgattgatctataacccagaaactccatgcttacagaggagagacttccctaaaacctctggtgagatcctggagaaccaggaaaaggcaaggtctgcttgtcttaaggcatgtaaaattctttgttttgtcatttttgtagcagaaactaataggaaagtgatggagggcattagcctaagtatttgactaaattctgcacactttctcttctctccctgcctcaagccttcttgttgggcttttagatcttcagagagatctggacatttccatctttcttcctttcctggaaataggaagcagaggaccctggaatactttttgtcttgggttttcaaagtctgataatcttctaaaaggtagcatagaccaaatttaagggaagtcttcatccccaaaatattacctaacatttaccaattggtcatttctgtgagtaaacaagaatgactgaagtagtaagggatgcaagagcctctcaatgaattatggatcctgaaaacagaataggaatcagaatttcagtgaatgacatgttgggagaaagctgttgagtgagtcccaggcaggagcaacatataggcacttaagacctgagggttggaggaatttaagagaagtgactaaagacaagtgggaatactttctggctgatcctaatcagttttatcaaagacccagtgtaactgtccattattcaggcctaactctccctctttttgatttctttcatgtgaggagtaggtggaagggaaggaaagtgaaaggagaaagaagcagtgaaacaaaatctggagaatgtttcttaggtatagggaagatattaaatattaagaaattatatgggtatatatgtggttgtttttttttaaaccagtgtagacccttcccagtacaatttttaagtcatggtattcgttctcatgttgctaatagacatacccgggactgggtaatttataaaggaaagaggtttgtttatttatttatttatttttgagacagagtctcactcttgtcacccaggctggagtgcagtgatacaatctcagctcactgcagcctctgcctccctggttcaagcaattcttgtgtctctgcctcccgagtagctgagattacagacacatgcgaccatacccggctaatcattttttgtatttttagtagagayggggtttcaccatgttggccaggctggtcttgaactcccaacctcaggtgatccacctgcttcggcctcccagagtgctaggattacaagcgtgagccaccatgcccagccaagaggcttaattgactcacagtttcacatggctggggaggactcacaatcatggcggaaagcgaaggggaagcaagacatatcttacgtggcagcaggcaagagagcatgtgcaggggaactcccatttataaaaccatcagatctcctgagacttactaccacgagaacagtatgggggaaactgccccctgacatgattcagttccctccatctggccctgccttaacaagtaaacttgaattgacaattcaaggtgagakgtgggtggggatgtagccaaatcatatcagccatataaaaagtagaaaatctgtaatttatttttatatgttcttagaatctttggtgttggtaatgagtagtaataaaaaagcccaaagatatggtcagacgkgtgaagattaaaaacaaagaatggtcatagttttactacctggcgtcagcctctgaataacttagatttgagcaaggggtttttgtctttttgtttttttccttttaaatacaaagtcttgttatgttgcctagactggtctccaactcctgggccccaagccwtcccagagtgttgggattacaggtgtgagccaccatgcccagccatccttttcttactttarcttaaaaattttttttttctttcttaaattttttttcttgtggaattttatttttaggcagctgataaattttgtgaataggattcctttcctgagggatataaattagaacattcttataataacatgttttgttatgttgttaatagtttgtaatcaaatatttttgctaatagtaaacacctgttttaatattaaaatcagtaacaactatcttacgtgtttatcttacagtttatgtttcatttaagaagatcttctttcctgcaagtttttaacaatagtcctgatgagagttcatattatcgtcaccattttatgcgtcaagatctgacccagtctctaattatgattcagcctatcctgtatgcgtattcttttagtggaccaccagaggtaagagggacagaaaaaaataaattggtcttgttactgcaatgtgtggcattaaaaaagtgaaaataactaaaaaaatgcatatagttactaaatataagaatttaactaaaagaatggacatctcaacctattwatgtattcgcttaaaatatttatgaatgtttactatatgctagataccatgtaggctgtattagaagattgttaaatttttttttttaaaggagatggaagagactttcagatcattttgtccagccatttggttaatcaaatcctccaaagcatatgattattctttacgtctttaacaatgtccagaagtgattataattctgtagactgtagcttattccagagtttagtgtctgtgacagttatgacattctgtctaaacaaaggctcttgttttaatctcattttcctttgtttttttgagaacataaaaaatagttgattataaagacacatgcttagaagattgataaagttatccatttaaccttcttagcagactgtcccacttattttaacctgttatcaaatgaaccatttttccattctgtagttaaaatggtctgttttactacttaaaagtgtgtagttactgtatttgaaaatagtaaggtcaatataaagagaatatttacaatatctattgattaatgatccctcatgatgctattattcacggttttgtaaaataatgggtaaaatattttatttcgttacaatgatttttttgtaattggtcaaatagtttctatttttctaggaaatatatatttttaatatgttggtttggctatatgtattttgccttgtattctttgaatcaggaatgttttagaagtaacttttttttcttctgagtaataacgtgcatgtagacatctgaaaaatgtagaatggtgtttagaagaaaattggaatcccactgtccctagtgcctgctcctattaaatttcaaccttttcatttaatccatgaatcctatcagcttcatgttcttagggttttgcttttggagttatcttctttctgttctatataattactttctgtccatctggatcattcttattaattaacatagaaaccataacaacagtcaggtttataacaaacggacaaaacacccccaccatgacccacgctttctctaactgccaccccatttctctgctcctggtgagagttgaactcaaaaaagttatttgttgtttatactttctcacctcacattgtcttctcaacctatataagtaagacttttgtccctaacattatattgaaatggctcttataaagaccaccaatgtcctacatctcaccagagctctcaacagtatttacctagtcttcactagtactcagcccttgaaaaccttttgccctaggcttctgtgacacctataccttcctggttttcctcttactcactcaccgttctttctcagtcttttgctagcttttccctttcagacctctaagtgttgacatgcttaagggatcaatcttctggctttccctgtcttccctctcagtgatgtagtctaatcccattgctttaatctttgtgctttaatctttgtgcatgtgacacctagatttatgtcatcagttcagaccactccctttcatttcatatgcagaactattttcccatgtgctccaaatttgctctatcccaggcctttccccatttaggcttaggagttatccttgaattcttcttgactttactctatttttaaattgtttgttacctcagcttaaagggattccttaaaaaattaaaatacactataagaattcataatagcaagagattttaggtaataaaatataaatttcaaatttaggccatcatggcctaagtttcaaatttagtgctgagcctgtaatctcagcctttgggaggctaaggcaggaggatcacttcagcccaggaatttgagaccagcctaggaagcatagtgagaccccatctctacaaacaaaaaaatgaaaaaattagctggacatggtgttacacacctgtagtcccagctacttgggggtctgagttgggaggattgctgaagcctgggagtttgaggctgcagtgagctgagatcatgccactgcacaccagcctaggtgacagagcaagacccttctccaaaaaaataaataaataaataaataaaagaaacttggaaaataacctggaaacatctattttatattattgagtagattatttttcctttttcctcatttctcattgttttctttacgttagccggttcttcttgatagcagtagcattcttgcagatcgtattcttctcatggacacattcttccagattttgatttatcatggtgaggtaagatttcaatagcatttaaagctatgcatgtaaagtctttttacttagaaaggttttcttacttctaattgtatggctagtgtttcatctatgataaactttgatttccatttttataaaataataaaatatgatgctgcctactataaggttttaggcttcaattgcagttgacccacatgtgattattttattcatttgtcacacaattggattttgcgcaaagcacagtgttgtgaaagtaagaacactgactgtacatagacaaatggcacttttgggttttacctgaaaacattaaggggggaaaagtcagcctttgtcagtgggcaggctttccttttacgttatgcaatcattataagttattattaagtgttctacatgatcttgaaaactcatttaaagcatacatgaattaaaatttgtaacttcattggaatggtaaatgattacagagagcagaagattttagtagctattaagctttaatccaggtatttagcagaccttgatgcattcctgcagttactcattcagccaattgttaagtgcttcctctggatgctttggaagatatagatgtgttcttttttcacagatctgttctcaaacttacagtctagtgttttactaagttctgcagatttattttttcagttgctttaattgtaaatgattttagatttgcactgtgactgggtgtggtggctcacgcctctaattccagcactttgggaggccaaggcaggaggattacttgagcccaggagttcaggactaacctgggcatcatagtgagaccctgtctctacaaaaaaatttttagaaaagatttgtactgtaatagtaaagacattactcaaaatattctttgaagtagtactacccaggacttttttttttttttttttgagactcagtcttgctctttcacccaggctggagtgcagtggcgctatcttggctcactgcagcctctgcctcccgggttccagcgattctcctgtctcagccttctgggtagctgggattacaggcacatgccaccacgcccagttaatttttgcattttagtagagacaggttttcaccatgttggccaggctggtctcgaactcctgacctcgggtgatccgcccgtgttggcttcccgaagtgctgggattataggcgtgagccatcgcgcccgacctacccaggagttttaaaagatttaattattattattgtaaattatttttaattgataccagtttctaatgccctttacttgttaagaataatacctgttttaacttcttgcctttgttaaaaaaaaaaaaaaaaaacctgtaatactgacagggctttttttttttttttttttttttttgctttttctttgttttatggtgatttttactttttcaagtagcttgttaaaggagaaatcagaaatgcacatgattgttttatacagaggtataaagctataaaagaatgtgttgactgattcagctaacttagaaaataaaccaggcataagtttttagatgatttaattacatggtgtttagagctacttacctatggattgattcaattgctttcacgtatcataagcttaggtagatagcttttagctaacattcatttgataagcatagtgttttaaaaattttctgacttatgtaagtattctttcattttacttttaaaggagaagaaatattctaattttatatttattaagaatattttctctactgaaattgtaacttttaaaaaattgaggtaaatggaataatggtctataatttttttagtttctaaagattattttctttggaaaaatctcaagatttttggatgggcaagaaatttaaagtaatttctttaattgttttaaaattagaccatagcacagtggcggaagtcaggataccaggatatgcctgagtatgaaaatttccgccaccttctgcaagccccagtggatgatgcacaggaaattcttcactccagatttccaatgccaagatacattgacactgaacatggaggcagccaggtaagtagtgttaatttgtttgtgtgtttgtttgttgttaggtttgcagtgaggtgtacctgcttgccttctgattttaatagattgcttcataaagcagacagaaaggtaaggagataggtggggaaggtatcagtgcttactttttgcattagcttttgagagcaaaacagtaagattattgactagttgcctaaacctggcactttccatcatcttctgtctctagcctagcttcctgaacagggccaggatggcattgtggtggtatactagctttggttgaacaagaaaatgtgaacagcttggaaagtaatatacttttcttaaagccgtttatttactgttaaagtctatgaatatgacatttgtggtaacttacattttttcattgtcttcattctatcattccaattttctagaaaataaaattttatgtaataggaaaacactgtagtattatgaaaaggttttgtggcttttaggattttgaggatacatatacgttagatacatatacatacatacacagttgctttgagaccttcagaaggctaagttaggttccttaacatactctcataaaatacttcttacttctsttttgtaattcttataagagttataataaattaaytataagttgttattaatttgttttacatgctctttgaaggcagggactatgctttgtattccctagtgcctagtacggtattataaaataggtagcaaatatcagtaactgttattcagaaatgataattactattagttttactgtatttatatgagagttatttcatattgagaatttgcaaagtacttctgcatgccttatctcatttgatcctcataagaattctagtgttattttcatttaacagataataaaactgagatctaggttacttatggccaagggaacacagtaaatacaggagtgggatttgagtcctggtactccagggccagtgctcttcactgttaggttaaactgattccttagagagtagaaaaagattttgtatgatactaaatttcaaaagatgttactgtctatgtgcttccattatgagttaaaaatcttactggttctttcattgatgtctcactgtgtgtattaccattttcctcttttattctggttattattttcatgatgataagccatagtgggtagaaggatraaatgttggatcacttgtctcatagaatcacctgtggtttaagaaagcttaagggtcattattttaagcaaaagaacatacagattttcatggcttttgtttttatcattatttgggattttgaacttctgaccaagtrtttagtaatttcacaccaaccttgtcataattgttgcacacataatttttatatgctgagttttggactcaacaatgtatttgttattttggatgtatgatttggagagaagaggtgcatttattatttatttgtaacacttagtgacctatacatttcaaagtttaatcttttaaaaattaagttaataaaattaattttaccaacacatactaaataaaattgattttgcatgatataattattcagctgatattgactgaaaccatttttgatggataatgttatttcttctttgcttttaaggcccgtttcctcctttcaaaagtcaacccttcacagactcataataatatgtatgcctgggggcaggtaagtttaaatagcaggtcttggaaattatttctttgtgtatttattgtttattattttagtgaaagctacatttttttcctgtgtatttagtaatggtttctgttggaaaagtaatgtaaaaatgagagtagaaaacagaattaatatttggcgacaccataggamaaaagtgatcctatcaaatagactccaagtttagcactatacccttgagacaaaaagcaatgaagtgtgtaagacaggaagtggtgactccagtttaatgctaggttgtgaaccacaaaaggccacgataagccaagagaggccagggatcatagttgagaaggaggggcaggaaccctgcaaatcattattgatatagtttaatttggtaaaagtcctgctgggtgtggtggctcatgcctgtaatcccagctgctcaagaggctgaggcaggaggatcacttgaggccaggagtttgagaccagcctgggcaacatagcaagactccatctcttaaaaaaaaaaagtgttaacctcttggtataacatatcaacatttattgagtgtccagtatgtttaggactttgtattggctctttagggtgcagttattacccatgcctttggagagcttgtagtctaatattagagataaaatacatacctaagtaaattacaaggcagaatgggatatttgtccttagaaagctatgaagtattacaaaggttagaagaggaagatggcaagaggtcacatagtggtagcaggaagagggtgtgtaatcagaaaagagctcagaaaaaagaaacatttcatttaaagaatggttatttcagtaattggaaattgcatgaggaagggaaatctaggtagagaatagtatgggctaagataaaagactacatgcagagctgactagaagaacataaaacggaaatgtgttgtacaagtaaattgtggaggatcttgaatgtcaggttgaggagtgagaagttgagtatttatttggtaagtaatggagagtcattgaaggtggacagrgggcagatttgagtcttagtatagttgaatcttaagattaaatggaagcagtctgtaggttgaaagtatatttacgaaaataatccaagtgagagggagtaaaggcaagatggtgaaaggaatagatttgggagatattttaaaagtagactcaataggacttgattagaagttgcaggaaagtaattatkccagggcatggcaactatgcacaaaatctgaattctgattgaatcctggattaaagggagagaatagctataaagaacataattgggataatttgtgagatttgaatatagatcatatatcagataactagtacagaattattaaatttcttgagagtgataatggtgtggttatgtaggagattcttcttgatcttaggagatacatcctgaagtatttaggaataaaatgtcatgatggcttcaacttccagaagttattcaacaaaaagaagaaaaaaggaaaaataatgtagaaacataaagcatacgtggcaaaatgttaacagtcagtgaatgtaggtatgctatatgggtgtttattgtacttctctctcaactttaatgtagtcttgaatttttaaaaaacargtgaggggaaacagggtattttggggttttaagcctgagtgactaggaaaacatatgtcaataaatgggagagtggagagaaattgtttggtttagacactgagtttgaggtactatctagaaggccttattgagccacaataagatgaccatattgattatggccatgttgagtgggctgttggcaatttgggtttgatggtcagggcaagaatgagaaaggtgataaagtcatcacagtaaatgcwtgtctgaagagagagtaaagaggtaaaggagagatgagacaaaaacttcaggggagtacaagtggtaggagtgtttagtgaattatcagagaggcagaatgaaaagaatagtatgtcataaaaggtgactttatagaaggaagaagaaggaggtaacaaactgacatgccgcagacagttgaagagggatacagagtgagaaaaggtgcttggatttgatggctaggaggttattcgtggcattgtgtaagcggctttagtatggtggttgagtaagaagataaatttataaggaattagtgggtgagaaagaagcggaggtcgaaagtataaatgattcttttgcaaatttaacctgaggataagcagtaggataggcagatgattgttattacggtaagggcacagaacttatttggagaccaagcataggaaagacacaaaagaacagatatttaagatcctcaggagacaatatgatcataagcagtayatggacgttaagcattggtaaggaggcagggcacttatttctgcaaaagcaaaaggtaagaagggtgaagacagaaaggtttttaggtggagtgaaaactcacattggataattgcctgtttcttttcaataatatgagattatttaggagtgaaaaaggctggagttaggggccaaaaaaactagaaaagattaaaaacagttctaaagaatacaaaaatcaactgaagattaataaaacgcttttgcagcagtggtgagggcctattttatttactaaaaatatctagagcatgcttccataatgttctttttttttttttttttttttttttgagacggagtcttgctctgttgccaggctggagtgtagtgacgcgatctcgactcgctgcaacctctgcctcctgggttcaagcgattctcctgcctcagcctcctgagtagctgggactacaggcacacaccaccatactcagctaatttttttggtatttttagtagagatggagtttcaccatgttggccaggatggtctcgatcttctgatctcgtgatctgcccacctctgcctcccaaagtgctgggattacaggtgtgagccactgtgcctgggagtatccatgaatagattttaattgtttcatgagggcggaacccttatgacccagtcacctcttaaaggccccacctttatactgccacattggggattttcaaaatgagttttggaagggacagatattcaaaccatagcaccgtcctacaattgcatgattgaatttgtgtaatatccctgtcctgtcatcccttttcccgcctccattttttatggcattgctcctgttagattattaattacttgaggcaataactgtcattttcatttttgattttccataggaccttaaacatagcatatattgaatacaatagatctggacaggagagagcagagattagaatattggaaatctgtggaggtggctaggagttaagagtttttgtaatataggtaaataaattgaatcccaggtccaaaagttctaaaagttggggaggttataaaaagtaatcttggaagggtggaaggctggtaatggaaaatgcagactctgcaagttacttgacttctctttgttttcacttccttgtctatagagtttaataaaacatgcttgaaatggacagtaatactcagtaaatgttagctattagttttcactattatcaatggaaaaaaaagtcacttcttatatttaacatgggaaaggaaacctattttaaactctgaagtgtaattgttactgcctggaagtaggggcattacaggcataaataagagtgctcaggtctttcttaagatttttatgagtaatgatgtcaatattttaataatcataatatctaatacactgaatctactgttttagtcactatgcttttagtgtactctcatttaattaacttttataaggtggatactagtaatcctatatttcatgagaggaaattgaggctcatatagattaagtattttatgcaagatcatgtagctaaactgtggcagggtctagattttaaccaaggtctaactccagactctgaatttttaatcaagttaatttgatgattgcatttaaaggaaataacagtaaccaagaattttactaaaaattaatggactctaatagcttacaggattttttgggggtcagaaatcaaggaccctatgataagtattatccatgaacggccgtaagagggcaccactgcaacacttctgtgacagtgctggaggcctctgttgctgtagtgcctcatatactaaataatgtaaagcttgtacctttctgcctaatcctggatatattttaaatagaaaaagggtccatttgaaaagttgagatcagctaactgctaattttttataaaatcgaatgagcattggtatttatcatttcaagcaggagctctgtggtatataaattaggaaatccttatattttgtcttgactaggagaaatggctctgagattgggtgacttgagatggaaaacattgtaaaatgaaaataaaatcaggcatagttacaggaagaaaaaagtaagagccatgaggttgttactggtttaggttacagttttgagacttgtgcttttctgtgttagctatgcatatagaataaagaaaagtatttcattgttatagatttttgaacaggaggaacaatagaaatagctaaaacatgtatgtctactgtgtgtactaggtactgttytgtttgctttatagaatttaactcatttaatcattacaacaacttgtgtaagataggtcctgttattatccttgttttacacatggggaaactaagacatagtttaaataacttattcagtcatatgggtaggaagtggcagagccagaatttgagcctaggcattctggatccagactctatgcccttaatcccagtaagggattgcctcccttcattatcaaatctttcaagttcttttgaataaacatatgataaaattgatttccctttattcaggagaggttatggcatgtttgtggctatgccagactagaatcacaggagctataagttctcatctcacatttgccaataatttgctgaaattacttaatttccctgttttagactttgaatatttataattaataagaacttgagtataagaagaaaaatgtaaaattcagattaaaaatcttctagaaataccttctcttgctgaagtaaaatttcattgttaatggattgggttaccaagatcattctgtcaatacagtttttattaaaatggataataggaattttccctaactcttgttaattacttggaacctacagaaatcaattaaaacgacctgaaaacttgagaagcatagtttatttaaaaaatgatattatgagtttgcttccttccagctgggatttctcttaaaatgccagggagaaagggtctggaggtcaggctttcttttaaaagcaccaagcctctaattccattgttagtcttcgtggtgactagccgccatcctgattcatctcatctcatagcataaactcctatgtgatcccatcagcctatgaataaagacactcctattaaaagcaccaagcctctaattccattgttagtcttcgtggtgactagccgccatcctgattcatctcatctcatagcataaactcctatgtgatcccatcagcctatgaataaagacactcctattatcagggaattctaaggatgtagagtctccctcccagcaaccagggacggaggccagttagattctttttatttaataggaccataggcattgttctatttcaaatgatttccttgtctattttaaacatttgtgtataaattccatgatatcaccctatgctttaatcataacaaatatctttttttcctctaggagtctggagcacctattcttacagatgatgttagtttacaagtgtttatggatcacttgaagaaacttgctgtgtccagtgctgcttgaagtgctaataatgttaaagacacttaagaagatgaaataatattcaaatttcattttttcctttttccatttatctgtggaaaccaacagatattgctctatattttttgtattagtatggtttgagacaacatatggaaaatgttcacatttgtagattaagctggaattataatgagagcaataagaacaaatttattttgcttaccacagtgttatagctggttctagaaatttgaagtctttataacttaattatgtttaataaaaaatagagtctgcctcgtactacagatgtaactcatttgtatattgcagacagacccaaagtggcactgaattttcttgctcaccttttaaaaacttgttccttaattttagccagaaagcaaaaaaacaatagtaatgataaatgtgaacatttttgcttattcattgaatatttttctgtaattttcagcacttatgtatacactttttctgtacttactaggttaaggcagatttatttttatgatttgtttaggaattatttgattttataatggtaattttcatgatgataatgtttttggttatttggaaagatagtttagagatgaaaggtttttttgggtaacaatcccgcagctgacaaaaaatgtgaaatttccacaaaatatccaacttatgtgactaaacgcagtagtttttttaaaaggggagatagaaaataaatggttttgttggagtgcattttagtaagcctttgcagtaaaatgacggttgtaactactaaaccaaatttagttttcacagcatggttttgttgttttccccttgtttttcagaggtaaattttgcattatatccttcagtattttaacactattttggcagtttacacattactttttgtttttccttcctttttgtgaaatgtattaagttgtggttcttattgaaacagtattatataatgtttgcttaattatatcatgtgatgctcagttctattttgatttattcattagtattcacttttacctttaaagtttacttgtagcaaatatgtttacattgataaagccagatatgttttgacaatgaaatttacatatcaagtactgcaaataaaaggtggtgctatgatatatgcttaggaggacagttttaatgattgtacttgcatgaacacaatcatatgatggtaaagcagaaacttaagaaaaaattgtttatgtgttatattcaattagcttaaataagttgctttgttatattttatttgaattgaactacgctaggcctaaatgccaataaaatatacttttcactgtttttctggctattttgaaatctagtaaaacctgagaagcctaatgtaaaattagagtatttaaaatcattagatttaaaagctactcatttaaaaaataacaactttaagatataattcacacatcatacacttcacccacttaaagtgcacaatttaatagttttgagtattttcgtgaagttatgtatgtaaccacatcaccacaatcaattttagagtattttttatcactcccaatagttactcatttttgttgtaaggctagtgtgtttttaaaaagggagatagaagttcatgtagttttttgttgttgttgttgtttgagacagagtcttgttctgttgcccaggctggagtgcagtggcacagtctcagctcactgcaacctccaccttctgggttcaagcgattctcctacctcagcctcccaagtagctgggattataggcgcctgccaccacacctggctaagttttgtatttttagtagagatagggtttcaccgtattggccaggctggtcttgaactcctgacctcaagtgatccacctgccttagcctcccaaagtgctaggattacaggtgtgagccactgcacccagccaagttcacgtattttgaattgaggaaagacattgtaatgatgacacctgtttaatttgcttggcctcttaagttatgttctttaagtgcttggcctcttaagttatgttcttaagtgttgtgccattgtttcttgtcttggtacttagccctaaactgtcctctacttctaaatcagttacagctgaatttagggataaggatgaacaaatatacccttttagttcaccatttaaaagcaatcacctgggatcatttttgtgtataatgtgtctatttctaaattattatctacctacatagactgttgaatgtttagccctgtcttagttcttttgcgctgctagaacaaaataccctagactgggtaatttataaacaatggaaatttatttctcacagttctggaggctgggaagtccacaatcaaggtgcaccatagagttggtgtgtggtgatggctctctgctttgtaggtggcaccttctatgcgtcctcacatggagaaagggagggaggtgaacaagcttccacagacaccttttgtaaaagcagtaaccccattcatgaggatgtacccctcatgctctagtcacttcctgaaggccccactgatctgggagggaggcagagaagtgccaggaagggaagggcgtggtccttggctagggcttcaccctcaggcctgtgcctacagacctaggtgaagactagcatttctgttttcctgcccaaatgttgcatttcccaagaccactgtggcccaccatgcccccatcctgtgcttttaagaaccccaagaccctagcgggcacaacacatgcagctggatatcaagaggaatgcattggcggaagaacacaaaagcagcaggacgtcgagaggggcatgccggcaaagagcacaccgggagactccagtagacaccggcaggccaaccagtggaacgacacagagtttggctggggtggccggaggagggcccgggctgctgagctgcctgactccaggggaaaactacctccccactccatctcccttctggctccccatccatctgctgagaacttccacccaataaaaccttgcacccattccccaagcccacgtgggatccgattcttcccgtacaccaaggtaagaaaccctgggatacagaaagccctctgtccttgagataaggcaggagatctaattgagctgacacaaactgcctacagatgcctaaagtgaaagagcgtactgtaacacacgctgggtttcagctgtgaacattcacccctgaacactgctgtggggtcggagtcccacagcctgcctgtctgcgtgctcctccttgaggttggagcattggggaactgaggaagccagccacacccccatcgtacaccctgccagggggataaggggacttttcccgtttcaccacctcttaaatgtctactggagattaggtttcaacataggaactttgagggaatcaaacatttagaccacagcacccttttaaagaacgtagatgatatggtttggatttgtgtccctgcccaaatctcatgtcaaattagaggagaggcctggtgggaggtgactggatcgtcggggcggatttcccccttggctgttctcataatattgagttctcgtgagatctgattgtttaaaagtgtgtggcacttccccctttgctctctcgctctcctgctctgccatggtaagacgtgcttgcttccccttcaccttctgccgtgactgtaagtttcctgaagcctcccagtcaagcttcctgttaaacctgtggaactgtgagtcgattaaacctcttttctccataaattatccagtctcaggtagttctttatagcaatgtgaaaacagactaatacagcaggacaggtaaagaatatttgctaaattattagcagcactgagaggctttggtatattacccggaactattttggaattcatttttgaacctactacctctattggcataatctctaaaaatgatcttagacatcatctgtgtacacagatattttggtgtaacaggataaatttattcttttattggcagattccaaaactgagctgacatttctctatttagttccccagttgatagacttccctctcatatccccagactcagagactgcatctaatgagtgtacttagttgtccagttcaggccagaaaccaaagaatcattttcaactcttactctcctcaacatctttggtaaccacgttgtacaaattcaacctctctagtatttccataatctgtttccagttctctatcctactgctattctgccttcattatatctcacatggtttggtgaaataccctcctaactagcctactttctccagtctcctattctctatccctcttttcaattcactttacacactgcaacaagagtgctatttctgaatacaggtctcattcagtaattgccttttgcccacccaataaagtccagacactttggcctggtaacattgaatactatatatcagatcataccccagttctctcctagaaaaatggtataaaagacacagttaaaaaggtgtattggggaggggttctagttgtacccaagcattaatttaggtgtggtatttggtatctatatagtgtcaaaagcaaatgcattctttactggccactacaaattaaattccatggcttattgcacttgcttttattttaaatgaacatggtattttttcagttatttttaaactgctgacaaattaggattatttcctttctttatcttttattaaattaaaaaaaaatagagacgaggtctccctttgttggccaggttggttttgaactcttggcctcaagaaatcctcctgcctcggccttccaaagtgctaggattacagggcatgagacatctcgcccagctgtatattatttcctttctaacatccattttacatttttattttcatttcccatgtatccagtatacatgcatatgtattttttgtgctcttcaaatgcttgacttgcattcatcttgatgattttatcaagttattttacagatgtttctatttttcttgtttgctttttaatagtttatgaaattaagtctcctttcttctgtttattcttcctcctttgtttatctattgaaacaactgctgttctaggcgtaatgtattattattcagtgaatagaataatattaaggtatgcaacactgaagttacattactaaatatttttgatttttttttcttccctacctatggattatactgaccagcatcttctgttgcttttctttgagactcggtttttttttctatatgtcttttcttacattttgttattgcctacctttttctacattttctgtgtactaatttttaaggagcaattttaaagctcagtattttactctacattgttcaagcctgatttgtactgtttgcaaatattttggtctccgattaatcttatctaaaacttcacagcgggaaaaacttaaattgcaccactgatggaatgatatgtttttttggttagtcctttagttttaaaaaacagttcaaaaaaaatgtagtgccatagatattcaagacacaaactgcaactctaagagaggggaaattattcaaaaattgttactaacttactttctaaatgtaagggtatccatgtatgttcaggacacattgtataactgggggttctctgaattaagttccatgtagaacacaatgtttattgaaagataacttataaaaatgtactaatcagacggttacacacacattattaaaactcagggagtaactacagcaattgtatagatcgtagaccaataaaagttttttcaggttggagtattttattactgcatttgtttataattgctggcatggggtgataatacaattcaaacctactgctctatccttgttaaatcgttaggaaaccaatcaatcaggtttgatttactcataagttgagaaatttcaatgaaaatcataatacgtttagaactgaacagtaaaaatatgccaaaatttgtattgaaaagggattattacacagaaataagttgttttaaatgcaactggagaaagaattgaaaagaagtaaatgttgcattcaacccaagaaaacagcaaaggagaacaaataaatctaaagaaagaaagggaaaggagataatgataaagtcagaatttttctttttctgtttttttgtttttttgtttgtttttttttagagacaggatcttgctgtagtgctcaggctcgtctcaatctcctggcctcaagtgatccttctgtcttagccttctgaatagccaggattacatgtgcaagccaccgtgcctggcttaaaatcagaattttaatgagatgagcaaaacgaatcaatggagtcgttcataaaagcaaaaaagtgatagtttgaaagtattaatccatttctaaagctaagaagaaaattgaatatcaattcttctgataagtgtaaaatacatgtgttttttttttatgttagtcttaaaaattattcaaagttttttgcccaggccaattaagaagcataattgcttagttatttaatgatcaagatccatctacttttcctctaatgaatttcaagtgagacttgatgtaacaatcatcatacattcaccactcatgaatacagtttgggaaactggactttcggagttaaaagggtcaattgaaattgttaagtcctatctctttacccaattcattcaaggatcccttcacaatatcactgttggtcacctgacctctgtaaaataccttcagtgataagtcaaacaacacagctgtaagttgctgaatgctgtgagtgacttttacctttagagaaaagaatgttgctgagttaggaaggatttgtatatgacataccaaagtcaactttgaccagaattttatggggaaatacttaactccattttacacaataacacaatctgaggggctattagctttcacctaaaaggccatctggcagtctttgatactgtcattaaaagaaagtgggtagacagttatgtagcaggtgtttgccaattagaagaatgctcccaagcaggacatcgtggacacactctccacagaactgtatattttccaactgcaataactgtgtatttaagtgaagaaaagtacattgtagagcttggtgttatgagtctgtttcctgtggaaagtgtggcctgctgtgctggggaagctgctgttttctcttctggtcaagatcttgctcaactgccttaacagggtacagggtgaagcatccacagaatgatcctgtgtgtacatttaacctgttctggggacggcactgtttgttttggcaa

SEQ ID NO: 97663 - DNA, 24147 bp, Homo sapiens
atcagcatgccgctggaccccggggaatatggccctgggaaggagaggaggtggggcacagggcagatgtctctcacctctcggtgtgggccaggcccactccttcttccagcctgctgtgcctcgtgccccagccagcctcggtgtccagggcttggtgtgcctggcaccctccccctacctttcccaacaccctccttggcggaagcctaccgaagccctcctacacccactgaggaggcctgcaaactgttttattagattaaagcaaacatctgctgaagaaggaaagcaaaaccttaattggaagcccccggggatgtttacagagacagatgggagaggatataatgaaatcacttcgctctagcctccatgcagacctggcagataaggcaacattgccaggcaacagggcttttccacctggaggcctgataaggggcttgggggagctgtgtgtttggaaaatatgattttgtaagtgggacgagggtgtattgactctgctgttccatggcctgggccccaacatcagataagcagctgccgctttccctggggcacaggcaggacccctggcaggaaccactcacatggagaagtcctgagcctcagtcaggggagcagccactcaccccctgggatctgatgctcaccaaaggggacacttctggctaccaggggctggtggtggcaatggctttctcttttcctctcctggactctggttcaggcctcctgggatggagttgggtgctggggctgctgggagcttgctagattggagggcccatccataggatgtattgtagaccccaatgcctcacaccctccccacccatcttctcccagtgactcctgcccttctcagagtaaaaatcaaagaccctgccaaagcccatgaagccctgcgtgatgcgagcccacaccacggcatctcctaccaccccggcctcactctctcccagccacctcggcctttttgctccttcccaagcctgccaggcatgcccccgccccagggcctttgcactggctgttgccccccaccccagggcctttgcactggctgttcactctgcctggaaatttcttcctccatacacctatgtggtttgctccctggaccgcttcaagtcctcactcaagttactgtcttaatgaggcttaccttggccacttatttagtgaggcccacgccctcccaccctggtattttacagccatcaccaccttctacgccactctagactgcacatatttattatggtttgctgttgatgtctgtctcagcctaggacataggctccaacaaggcaggggccttgcctcttctctttagcagcatatttcaagaatccagaacagagacaggaacacagcaggtgctcaagacatgttagttgaatgtctccccttcccagaccccaaacagctttggtagaactggtgaaaaagaggatggatccagagaggccggagtgtggcagggcctggactgctcatctccaaggcagctgagcaaccctgggcaatacctgggggaagctcattcccccatagcacgatcacatgggacattcaggggaaagcaaccttttccaggaaggaaaacccaatgctgggacccaggggagcttagctctcaacccagccctgctattgatttggatttgctgtgtgacttgggacaagacactatctgtctctgaaactcaattccccttttgtcagacaaaattagcatctacctaaaagcaataaacttccacatttatctaaaaccaataaacatccacgttactgtgttggggacccacagcctgaggttaaatccttcctctgctacttgctagctgtgtgctattaggcaacttaggcaacctctctgaccctctacctcctaatctacaggtgaggatgatgatagtgactgcatcacaagtacgtgagcctttcacctgcatggactgcttcactcttcacacacttgtgagcaattctatcatcctcctcctcatgggaagtcatgggaaagtggctggcatgggccgctcagggagttgatggaaaccccagggtaggctgtgtgtcaggctgaccctagagccccgggctctgcccaccccttcattctgtcactgcaccttggctcatggaaggccctgttcagtttcccaaccaagtgcattctggcctcggcccaccctcaccatttggaccacaaccttggtcggaggcattgcaatgacctggagctgacaagacacttcctaggtaggacaggtgtttaaagagccaccctccacactaacaccaaccaaaccccggagccagggacagaggagaaacctgccagggcccgagaagggatgaggcttgaagggcactgagttccatgtggccacagtaccaaggaccattggaggaacgggaaaacagaccacccacacctcagacacagagccggtgctggtcagcgtcttagcttgggttccctgagacaaggatttgagtgcacgtggctgacaaggaatccctggtagaagaccaggaagggaaaacggggcgggagggtgaatgggtcgggaagggaaaggaagccaatgaagtgtgcgctatcaataaagtgtgcgctgtcaataaactttgcgctgtcaataaagtgtgcgctatcaataaagtgtgagctatcaataaactttgcgctgtcaataaagtgtgagctatcaataaagtgtgcactgtcaataaagtgtgcgctatcaataaattgtgcgctgtcaataaagtatgcgctattaataaagtgtgcgctgtcaataaagtgtgcgctatcaataaagtgtgcgctgtcaataaattgtgcgctatccataaagtgtgcgctgtcaataaagtgtgcgctatcaagtgtgcactgtcgataaagtgcgcactgtcaataaagtgtgtgctgtcaataaactgcgagctgtcaataaagtgcgtgctgtcaataaagtgtacgctgtcaataaagtgcacactgtcaataaagtgcacgctgtcaataaagtgtgctctgtcagtgaagtgtgcgctgtcaaagtgtgtgctgtcaaagtgcgcgctgtcgataaagtgtgcactgtcaatagtgtgtgctgtcaataaagtgtgtgatgtcaatagtgtgtgctgtcataaagtgtgcgctgtcaataaagtgtgcactgtcaataaaatgtgggctgtctaaatgaagtgtgcgctgtcaataaagtgtgcactatcaagccagacatcactgctgggaaatggtaccaaaaaatcctccttcgaattatcccacccaggggtatttacaagtaaaagcctgatatcaccggctgagggctgctcctgggggtaactccctgaacttgcagctttctgcaggcttctgggtttctaggttgcagtgagccgagatcgtgccactggaatccagcctggatgatagagcaagactccgtctcaaaaaaaaaaaaaaaaaaaaaaaaaaaaaaagagcctgtgggcacagaagggtagatcccagcggtgggaggttcgtcagggccctcaaagcaccaagagacatgggcagggctctgactgcactgttggagttagattcacgcctggcttttggggagcagcaagaggtcctggccagctctgagcctacatctccccatgggggagagagagggctacttttggggcctctctcgaaatcagcattctggagaggagaacatctgtgagaatcctccctggatcccagtagaccaagcccgggcaggggctctggtgcccctccccttctgttcactagttccagtgcctgtggtgctcccagagatgctggctggacagcttctgtcctccagggaggccaggacacctgctctgccccctgctctctatcctccaggctagaaccagccaccttcttgcagtcaacatccccacaagacactgagagtgatttttttttattgtgataaaatatccctaacataacatttaccatcttaaccatttttaggggcacaattcagtggcattaagtccaattatgttgctgtgcagccatcatcactatccatttccagaactttttcatctgcccaaactctgtacccatgaaacactaactctctgtttcctcctccccctcagcccctggaaaccagcatcctatttcccatttctgttgttgttgttgttgtttgtttgtttgtttgagacagagtttcactcttgttgcccaggctggagtgcagtggcatgatcttggctcactgcactctgcctccacctcttgggttcaagcgattcccctgcctcagccttccaagtagctgggattacaggcatgcgccaccatgcccagctaattttgtatttttagtagagatggggtttcaccatgttggtcaggctggtctcgaactcctgacctcaggtgatctgcccgcctcagcctcccaaactgctgggattacaggtgtaaaccactgcgcccagctgacccaccctatttaagtataaccccaccctgtctcagcacagccgtccccttccgtgctgacaaactgtggatgttacttcttattcattgtctgtcttcaccatctagaatgtagggcttctgtctgttctgtttaatgctgtaccctcaactgtgtactgttctaggatgttctaagcacatagtaggtgcttagcaaagcaaatatgtaaattcatgaatgtggccatttcagtctcctttgagctcccaccaggttctcatttagggacaggcgtgagcacaggtgtgggaaaggaagtattagtagaaaacagcagccgcagatggagaggggtgggcaggaaggaggggctctggacgatgccagccaatgacaaaccgtcacccagatcccaggttccctgtgacagtggggtcaggtggcaaagagcttccaacatggcccccagagctggagcccaaagatctggagcatcaggggccccagaaataagggaagccaaccaggaaactgaccttttacacaaaatatccaggttttgagaatgctcaggaagaggtgagagctgttctcaaattcagatgggctgccagtggcaagaaggtgatgctaaggggttgcactagggctaatgggtaggtgttgcaaggactcctattttggcggatgtaataagaactggcccccactcctccctctacctaacaagaggtgtccaacagtggcttaagcttcctggtgaaagtgagcccctggttcccgtgtgtatgcagagcccaggattcactcacccatggcttgaacctttaatggatacattcatcagttacctgtcaagtgcgtttcctctgtgccagattgtgtggcgctcagcactgtgaaagtaatgatgactaaacattattcaaataaatacacattcaacaacaaagtgtgaaggcacaaaactagcttgccagagagagagaagcctcactcagacaggggatcaaaggcccctctagagcctcctagatattggagagagccatgagtgatgggcatgcctccagcctgtgagaccgggggagcataccccaggcagagggcacttaggaaaaatagcacggggtgctagcgctgccagggacctcagtacacatggaagaaggcaaggtccagagatccgagtgacttgcccagggacacaaggcaaatcggtggaatcgtcgaggggtggaggatcagccacagccccccgcctcccacgccacctcttggaaaccagatacccgcctcgcggccaagacccaccagctccaagcggcggaggccagaggtagcgaggggtgaggttagaggtgggggcgagcggggactggacacctggggagtggggaaaggggaagggggcggcaccgctgacgtcatttccggggtcggggtatataagcggggcgcgagggcgctgctgctgccaccgctcctgccactgcagtgctcgagccccgtgcaggggagcttgcgggaggatcgaccgacagacggacgcacgccgaggcactgcgcccccagccccgcgccggtgccaccgcagcccgaccccggccgccagtccagccgcccctcgcccggtgcctaggtgcccggccccacaccgccagctgctcggcgcccgggtccgccatgcgctccgccgctgtcctggctcttctgctctgcgccgggcaaggtgagcgagcgcggggagctcgcgggagagggttccgggcgcccctgcccaccttgaggtccgggcaccgcgcggcgccccgcacccctccacacttcccttcgggcgcggcgagttttcagcaccgcggacagcgcctccgcctcccgcctgaccctgcagtgtggcctccgcctgggacccacaagacacttgggcctgactcccaaccccscggggcaactcccccttgtgcccaccccttgtctgggcttggcgcctcggttgcatcagggccagtgccggttgcgcggtggccggccaaggtcactgcggggaggtgggagcatggctgctcgcaaccctccacccctcttcccctttcatctcacgctccccgcctttctgcccttgacttctacttctccatatcatccctcacaatccccttcctccatctcttcccccgmcccccccacctctggggtctctctccccttcgtctgtctcccacccgtcccactgtgcagctcttggccttgtttgatggcgctccccgctccaaagcacacccgctccagagcaagagtttccaaagggggaggrggaggacctctcagtgcagcctctggggaccaccccactgtgggcagcaaccagggaagggaaacaaaatcagccctagcctctctttttggtgggggcagttttgaggggtggcattgggtgaacgggccccagtgagcccggtcagaaaggactggcctccacttggagcagaggagtgaccccagcactctcttcttcttcccagtcactgcgctccctgtgaacagccctatgaataaaggggataccgaggtaagaaggggtgctggggatgaggggtaggaggctccagtggacacttcacagccagttcttgggcagctgcaggagtaagttcggcataaagccaagagccagcactgcggctgctgagcctggggacagcttgcaaaagaagatatcaaagattgcttgctttccctgctgtcctgctgtgggracttccccagcttcctctgagctgcacrtgcagcggaagaggcctgcatcttacctgctgggccgaggtgcctggcttcaggctgtcttgaacactctgaatccagtaggctccccaggggctggtgggggtggcttctctgtagttgtagttgtccacagacctgtaaaaatggcctttgcctgcctggctctggcctccccgctttgctctttctccctgaaaggctctgccagtaacaacccacacccagcaggctctccagccctggctgtcccaaaggaacacaagcaaaacatcttgatcatggctcctgcacccacggtcccaccaataggggctagttgtggaggtcacccaggaaagggccttaggagacactagtaggggtttctctggcagcaagagacacaccacgctgggtgtgtacttggaattcattcatggctgagctggggctgttttttccaggctctagtgctcatccaaatctctgacttgagggtcagagaaatttctactccccaccttcccagaaactattytcttccactagacaccacagttaaaatccaaaccatccaagagattccaacctcwgtttgctcaattatatttcctatgttttagttgcagataggacagaatttaaacctctaccactcattctagctgtgtgaccttgggaaaattccttaatttctctgagctcygcctttttctccttttccttgaggggaggtgtaaagagtaggaatcatggatgtgaattgcctagcacataataggtcctcagtaaatgggcacttttattcctagagctgccttcttgatctccccatccctctccagaccctctacccaattcctgcctcccagaaaatgccctctcgaacaggtggttatctgatattcccaatgcaaggtccggggttgcagggagatacagggtacaggctgctgtgctctccttgctagatcccttatgggagacaccctggtcaccatattatacccagcagcctgtggtcaggggcaccagagcagctggctaagacctgaagattctatacgaggttgttgtgactacatgcattatacagcacttgccartttgccatcttggatccttggaccggttgccttggcatcccgtagacacagcctcccaccccctcactccctgccggtgttgcctgatgcctgtctgacacctcctgctctctactcagctctaggctgtggaagcagggctggagttgtgaacccctccctgggcgtgctgacactccatgcttgaaagagtgtttttccatctgtacctcattaccctgggagagcagttgggaaggtattctcactcccgttttacaaatgaggacactgaggctcagagaggttaagtcacttctccaagatcacacagctaggataccacattacggtgggcaccatcatcaaagatcactcatttatcagatgcctaattatccacagcacctttgcaggyacaggataagactttcagaggcgtggctgtggttgacctgggatatgctcccaggtgtagtcaatgtgtgctcacatgccgcccagggattcacccatcccatgatgaacatggagtgagaatatgaagctgtgactccttgcatrcgacaacaccatgggtgtttggagacagtaacctacatcctatttccaaacagggtagagccagggaaggtctttgtctcctctgggcagtccagaaggacttcctggaggacctgacctttgggcatcttcacgatcagagcacttttgtaagacatcattttagtgccctgaggcagttttctcatgtttagagaaatagcacttggggatgagaaggtaccaggtaccattccctacaccccattctcactatgatccaccttggaggggaacctgctggccatgtggttggagtggctgacacatggtaagcactgtgttaagggttttctattatcattgctatcactgtctggctaagaaagcagagctgtgtccctgagccagggatcatggamtcccaaagacaaaagcaaataccctctgtcctcactagaaattcaccctagagcctccagggactgagccccatgctcaaaccagccccaacctgcccctgcactgtgttcccaggtgatgaaatgcatcgttgaggtcatctccgacacactttccaagcccagccccatgcctgtcagccaggaatgttttgagacactccraggaggtatgagctggaggctaggggtgagggctgctgcctgctgggctgggaggctaggacatgggtgtgtggcttttggtggaattaatgatttaactcaacagtcactgactgagtgcccgtcatgtccaggcactgcaccagggtccaaggtgtacagacagttgaaggggttgtagcccaggtgcttacagactggcagaggggatgcatatgaacacagttaactagaactctgggcaaaataaaaccagggctggaacagcaagcccccagactgtgagctccctatggacaaagattttgtgtgctgtatcccagtgcctagaacagcctctggcctctgcagacaccctctagatgtgtgatgaataaaggaatgttatgggtggacaggagaaggacgaaatctttccaggcaaccagtcaagtttttactaactgctggatagagccagcagcatttcggttgggctttaaaagaaacattggaaaccgatgagtggaaaaatgaagacagggttgtccaggtgtggtagacagtgtgaacacaggcatggagatgggaacctgttgtatttaaagagaccccactcatcctcaggggttgccaccctttggctaaggtctggctgctggggcagtggctgacttctctgatgtagtaggaaactgacacataccttggaaaggaggtaatttcaaaagtgttatctgaagacccaatcttgctgccaccaccctggttttgagtttccagagtaaattccttgtgctcagctgaaaatattgatggtaatctctttctcggctgttctctggaaaccacccatgatgactcttcttcattgcagatgaacggatcctttccattctgagacatcagaatttactgaaggagctccaagacctcgctctccaaggtattttccagccactgcacttgactctgggtaaattccagtaactgagagtcagaaaatctggtggaagattcagcaagttcctctctgggactgtcatttccttttaattataaagcggaaaagcaggatccgccgtgccacctggctcaatctgttattgatattgttaaagaaatcaaggcccagagaggttgagtgacttgtccaaggtcacacagtgaatagagacatgccaggtgcagcttccctaaaacccacggcctctgcagttcagtcattttaggaaatacctttatgaagtagtgagccactcrtcactgatgatattcaagccaarcctggacaggatactggagtggagggttaagctgccatcttcccacagttagcctctatgcccagccccccagctccttccaggcttgatgcaaagcacggccctagccttgcaagtcaggaaacctgagtttggccctgcacctgccccggctgacttcctgtgggaagcggccgtttccaccagggcaggaccactggtggtggtgtgtctctccatgagaacagggcattacagcatgaatccagcatctgcttcccaacgaagcgagagtgwttttcagggctgggcttgtgtctggggtggggtgggggtacgaaggctgctctggcttcaggatgggccccactctgaggcctttgggacagaccaggccaygtgtgagaacagagagggctttggggaggaggcrcgtaaacacagccacgtcagtaggattcctgtggccctttccaagctaacacactgttcttcctcccactcatgagccagcctgggcagcaagcacccacctcctactgttgttggagggggcagggagtgctgggcacagctgggactattattacctggatagttatgtcatcatcagtgaccytggactagtgttttgttttgtttttaactaagcattaaatattttattacaattgataactttaaaattaaatattgaatgactaactgattacatttaaataattaaatagactgtcaacagagrctattataggagaatgygtcctgaaacatctctattcacatgcacgtgtgtatcccgtayaagcagtatccaatatatgtatatatgactattttccattaacagattcctggatgtatttctgtccatccgtctatccgtccactccctcttgggctcccataacatcttctgtgtgcctctgtcttagcatttaccacacagcaaccctattttctagacaagcacccaactcttggagagcccaagttgcccatggagctaggaaatagccagaaggggactggaacccacgttgcctgagaccagggctgggcatgctccctggcccacagctgcccaggaaagcccattgttggggaagaaatgagctgggctarctgaggggccaacatcaggaataaggcacaggtgtggggacagtcagaggaggcagcggcggcggggggagaggggtctctgggtcatggctgcaggcrccaaccctgggctcagatgtaggcacagggcttggccttctccccgggcctggactcagcgtccaaggttagcagagcttgcctgaatcaagagctgtcaccattactgcctgctgcagggttcctggagctaccagccaggtcctgaggggttccccacccccaactcctgcccagccaggtcctgaggggttccccacccccaactcctgcccagccaggtcctgaggggttccccacccccaactcctgcccctgggatccttgctccatttgagcctttcttgctgtgtggccacagcacgcttgctctggcctcccagggagaagctgagtctggcgaggcagggtggctgcctgagggcccagctgagagaggtgagggacgccaacccttcaccgctccccaagctcacgccccatcagtgtctcattgggcaggccctgaacatgatgtgcccagcttacagatggggaaatggaggtcttcactcttatagacaaatatgccacagctgcacccaatgggacttttccctccttttctcataccaggcgccaaggagagggcacatcagcagaagaaacacagcggttttgaagatgaactctcagaggttcttgagaaccagagcagccaggccgagctgaaaggtctgtcccagccggtctggccggaggtggggaagggagggtggcagtgggaacagtggctatgatggacccagggttccagtgagtcgggagccccacccataatcccttatttccctctctctacaaatggggaaactgctgctcagagagactaggtcccttgcccaaggtgagtggcatgaccaggggtttcgatctggtcctgcctcacaccaaagccctcgctcggtcccgtctgcccagaagaggggctggcactctagggcaggagatctctggcatggcaggtggacagcttcaactctgggtctacccagtggccactgtagcagagcccccacccccagtgcctgtcctcctgggaagtggtggggcctcagaatagccaggatgcaggaggaccacagacagagtaggtgtgaaacgtgaaatgaacccagatcatctttcttgaaaccaaagagcttctaggagtctaagaggtcatgccttaggtcagtgcgacactctgagccatcctcccttcccggggagagccacaaactggccccgtggcgcttctgctctccatgtagaagatgggccggtaaggccggtgtccaggagctggatcctggtgtctcccatctggggctgaaagggaaagcccgcaagtgaagcccaggtgcccccactttggttgaagctttaatgaggcaggcagccatgtgtcagtgcaaagagatcccgagcttgtcatttggaggcttgggttccaggctcagctctgctgcccgcaaactgtgagatggacaggtcatcttacctttctgcagatcattttgggtttctgtgaaataggcataggagcacctttcaccagagtcctggtgaagctcagatggtggaatgtacttgggagcactttgttcagtggttatcattctaatgacgggaggaattttcacttgttcaaaggctgtctttaaggcagccacaataaaataccttttaatgaaaccctaaaatattgcagaattgagccctttcacaggatgctgaagacagagaagccccacatggaggggagaatgaagttgcagtcatggtgcctcttacacagagaggttaagcaacttgcccaagatcacacagctgacattaattttcagttcaggctttatctcctggattaatcttaaggtctggttttttgtttttgttctttgaataataacctgttttaaaagtcaggattaaaaagaaagaaacaaatccagctgtgctcagatcaagcctggacatggacagaggggtaaccctaatcgttgtcctgggctgggctcgctggaagccaagaaacataatgagtaacatctgaaattagcctgtggggaggccccacacgtggcccagtcctcagggcctgacttggctgtgctgtgtctgcagaggcggtggaagagccatcatccaaggatgttatggagaaaagagaggattccaaggaggcagagaaaagtggtgaagccacagacggagccaggccccaggccctcccggagcccatgcaggagtccaaggctgaggggaacaatcaggcccctggggaggaagaggaggaggaggaggaggccaccaacacccaccctccagccagcctccccagccagaaatacccaggcccacaggccgagggggacagtgagggcctctctcagggtctggtggacagagagaagggcctgagtgcagagccagggtggcaggcaaagagagaagaggaggaggaggaggaggaggaggctgaggctggagaggaggctgtccccgaggaagaaggccccactgtagtgctgaacccccacccgagccttggctacaaggasatccggaaaggcgagagtacgtatgatggcgaagacctcaacgaacrtgtctgggagagggggatgggtgggaggagagccttctccataacctcattccaccttcataacaaccctgaaaggtaggtattagctccatttcccaggtggacaaatgaggctcagagaggttaagtaatttgcccaaggtcacacagctaatttgtagcaaaagctraggttctaccccagatttatctgactccaaaaccatgcatttcccactattccacatagcctccccccaccaaccccagaagctaggggtgggtgatgggtgggctggctttgggaacagagaccatggcaggagcgcacaggctgatctgggaacagtgtcagcttcaactacggtttaggagaggccctggctcccgctgcgggcctgtcagggtctttcctcactctccagctgccgggcttctggggtgaggatgaggggaagaggcaggctccagctaacccacccctctgagccgagagggtcttgcaaagcctggcatcaagaaggtttttcccgctaagcgtcatcactgtggagaggctgggctgtggccgcagcagaggcccccagggagtggcagagactgggaaaatggyggtcccccacccattctcctgctcttgcccaccacctgctccaggtcggtcggaggctctggctgtggatggagctgggaagcctggggctgaggaggctcaggaccccgaagggaagggagaacaggagcactcccagcagaaagaggaggaggaggagatggcagtggtcccgcaargcctcttccggggtgggaagagcggagagctggagcaggaggaggagcggcyctccaaggagtgggaggactccaaacgctggagcaagatggaccagctggccaaggagctgacggctgagaagcggctggaggggcaggaggaggaggaggacaaccggracagttccatgaagctctccttccgggcccgggcctacrgcttcaggggccctgggccgcagctgcgacgaggctggaggccatcctccygggaggacagccttgaggcgggcctgcccctccaggtccgaggctaccccgaggagaagaaagaggargagggcagcgcaaaccgcagaccagaggttggtatggggcgggagccagctctgtgccaggccacggagcagcagggggcagccgcacccagacacactgcccctgccccactgaggggacagggcccccccgccrragtctggggatggagagatgctcagaccgggggctctcagggtgggagaacaccccagctcacagggggcacccagcaaagctggctgggagatgggaggagctcaggtcagcctgtggcagcgggggaggcgctgagtggggacgttgtccagaaggcagtagggtgccctggaaaaaccatgcggtgggtctgaccgtgtcccctcctggcccccaggcagcccaggcacagcctcctcccaggctcaggccctgcctctggcccatgagggtaacggggcagggcaggggcagggccaagggatctcttgcctgtggggagtgggtgggagccacaccggatgtgagctggaagacctgggctctgcctcctcttggctgcgtggacttgggagggtcactcccctccccgagcctcatcagttccatttatgaagtaggggtaaggagtctcctctgcccacgtcattaccatgattggaacacacaaaggctttgaaaaccagggcccctggggaagacaaatggggcgtggggacacagcccacaggagcaggggggagttggggtccctggcagctaggcggctgggatacctggttcaagcctagtgtccaggtaggaacccaggctctgtgggaaggctgacacctgtccgcagccctgaccccaaggctcttctctgcccacctagaagagggtgtggccccttcactgggcccccgaccccctctctgggcctggcagtctgagaggaagaaggctccatgttggcagctgtagcgggagagggcatctgcccacgtgcctgggagcccagggcgaggggctgaggacaaagctggagagaatgggggcccagaggtgccaccagcttcctttctccacaagcagagggagctctggaccgcagggcagagaaactggacccctgaggcatatggagaggatggggtgggggcctcctcaacacagcccaagggtcttcttagaaacccgagcctcgcagagcacctgccccagggcctcctccaagactaaggggctgtagagtctatttccacggcctgcaatgtcggggtccctgggccaggatgccctcggcagcctcaaatctggcagtgaccccgggaaaatgacccctcccaggtcaaaggaggcagccttccctgcgctcctgctctaagtcttgaggttgtgctcttgtgggtgtccaagttctgaggcctgaaagcttctgcagacrggcatagaacagggctcagaggaggggtccctgcttccctaaacttgggtagccagagttcrggatcctctcacaatcaggaccagggatcaaagcccagccctaggcaggctgatgtggggcagctcccccagcatgtagccctgtctcaggccccacattcccctcaggtgggaaggctgcagaagacagacccggaagtcccaggctggcctcaccctgggtcctggcaaccatgggctaggccgagggaagggggctcttcagggcactgtaagctttgttttccatgtgccctaaaagaacrgactcccacctgtgcggraccatttgagaggaagtggggcctggataagaggccaccaagagcagtgtggggacagggcccccggcatcagccaccttcttgtgcataatgatcccgagagcagtacagtaagctcattatcactgtctccatgatggatgagggtacagagagacaaagccacctgtccgaggccacacagctaacccagcgcctttctggcttactgtgccttccatgccactggccaggctggcccgagtgaaccccaatgtctctcctaggaccaggagctggagagcctgtcggccattgargcagagctggagaaagtggcccaccagctgcaggcactacggcggggctgagacaccggctggcagggctggccccagggcaccctgtggccctggctctgctgtccccttggcaggtcctggccagatggcccggaygctgcttcyggtagggaggcagcctccagcctgcccaagcccaggscaccctatcgccccctacgcgccttgtctcctactcctgactcctacctgcccyggaacatcctttgcagggcagccccacaactttaaacattgacgattccttctctgaacacaggcagctttctagaagtttcccttyctccatcctatcmmctgggcacaactgcaataacttctgaccttttggtgaaagctgagaactmctgactgtaacatattctgtatgaactttatctaaagaaaaataaatctgttctgggctctttcctctgaattttttcgcctctcaacttaagagtggagtgagatgcactggatttgggcgaagggacaaagggaggttcagtcctcctggggacctcctttctgggccacttcctggctgtgggatcttgagcaagtgactttgttagctctgagcctcagtttcctcatctgtaaaacgggaatgctgacctgcctcaaagagtgtgtgcagggattaaagcacacttgctgagggcctccaggttccttcctctccccgtccccagccacacctgagctgggccatgcagaggcagcgccaggtggggacacgggctctgtttcctgagatcaggtcgcccctccctgatggtccccgccatccagtcacctgtggtgccgggtggaggccctgacagccccagtctagtgcctgtcgcaggacacaggcatcagacttgagcctctgagctgcagggaccgcttggcataaccacttattaggccctgctatgacttctggcctaggaagaaggcataggaatgtggggcgtctgaagatctcgtgtatgtaacgcttcactagagcacgggctgctcttagtcccagttttgtgaatgaggaaactgaggcagagaaggtgaaatgactcacccaagtcacaggcggggatgatgctcagaacactgaagcgtggggactgtgaggattacacagtcaggacccatgtgtactggctgaatatcagggcccatcattcagtcactcgtcaaacatttgtgcatggctgctctgggcctggtaggcctgagcatggctgagacaagccctggctttaagaagctcactgtccagcggggacagctgcacccttcaacagccaaagcaacccatggggacaaaagtacgctcagcaggaggagcacacgcccacgctggagggcgctccttgcaggccaggaggaggttgggttcgagccaggttctgctggactggctggttagccttggccagtcacttcacctgtccaggtggcagttctggggctaacgtccttggcctttgcagctcaaacacgagcaagccagggagggtgatgatcccaggcagtggtggagagggtgcagggaggggcctcggccttcgcaggctgcccacgtggtgtcttccaggtaggaatgggaaagacatgggcattgtgggtgggtgaggctcagaggcatcgctgccaccctccagggtcccaggcagagccaagtccagaggccagttgggatttgggaaccaagtccctgaggctctgcctggtgagtctgagcaggcaaggttccatggtgggaactcagatttggacctaagactggagttgaactccccagcccagccattaatgagcaggagtctttgggcaggcgctcctggccctctcagtgcctcagtttcctcatctataaaatggagacaatacttactatctccttaccagattatggtgatgatcaggagcccacacagaaaaccactgcaatggtgttgagtcgtttgaggggtctcggcaagtctgggtttctctgatgaggatgggctgctcatggcggctaatgcgcaccccctgccccctgcaaagcacagaaggacaccctccgaacggctggcgctattgtttatttcttcatgtttccaaaagttaggtttatactccacccctacagttacagaaataaacacaacattaactgtactccactagaccgttagaaatcaaaacaagactagttagcaaatacagagatcctagcgacaccttgtccctgaaaccacccatcccaaagccacccgcagtgtcctaacctcatggagtgaacatgcgaccaggcgaatgagccaatggacagaagccatggtgtctgtatctcatacatggtcatgtatattatgcatatgtatgtacacaaattaagtacgaaccagcttgggattctggtgaagttgcttgtgaacagcttgaagcaaacagcatttgtcacaaagcccaggtgtcggcaggaacagcaacatcctggtgaaatccctgtgagtggcttttcagagtgagcttctgagaggtgattccacacagccctggaggaagggggtcggccaggctgcaggaggggacagtccctccacaccaccaggtcacagatgactcttgaagggaaaatgtaatcatttctgaaaagggggggtctgggtgctcctgcgggtgagaatcagaagaagaccccaaccagcaggaggccatggagtcatgctcaccagctctcccctgagcagtgcgggaggctcactcactccaaaccacactgacaatggctgtgcagagagaaggtacacagcacagaccctttctcacaaggggaggacccatgggagaagcctcgcctgtatcacctgagtcaggcttatgcctgggcggggcagatgactgtggcatcggggtgtggccaggctggcctgaggcagcagaggctgggcctttgtcaaggacagctgcacttctctgcctcccggtcaccaggctggaggggtcgtgctcctttagggcagccagcacccagctcaaggtctctgaatccaatggcccatgagccacagctcgggaaggagaaggagctgccggggatcccaccgggtgaatgatcagagtttgtttgtttgtttgtttgttttttgaggagtcttgctctgttgccaggctggagtgcagtggtgcgatcttggctcactgcaacctacgcctcccgagttcaagcaattctcctgcctcagcctcccaagtagctgggactacaggcgcccaccaccatgtccagctaatttttgtatttttagtagagatggggtttcaccatgttggccaggatggtgtcgatctcttgaccttgtgatccacctgcctcggcctccctaagtgctgggatgacaggcgtgagccgccatgcccggccagagtttctagggaatagaagagagggcagatacagaccccagggacattagtgaagccattcagcagttgtggccagtggccaatgtgagtgcccaagagccaagaactggtcttccaggctagaaggacaaacgacaggctggctcccttggtcttggggtggctgtctggcaggcaacagctgctttgctcagttggctcaaacatgtgacagcttcctacttcagtcggtcttccagccttctataaagcacacttggcagtcccctgggtacagagaggaatgtttttcccaggttgctttctcctttattgacaggcatgagacacaggcaggcccaggcacaggaagccccatggaacctgccaggttgcagctgggtccaatcccgccggccatgctgggtgactgcaggcccagcccacccaccacgtgtggacccagacacctccatgacaccaagggcaaagcaccagttccagggtggcctccccttggctcttggggtggggacacccagcagctggcactcagttggggggttatgtttgcagaatcacatcaccatataatcaaagcactgtcaggcagaacttgacccacggcctcagccccagggtgctcaatgcagactgtgcaggtgaccctctgaaactacccaaggactcagccaaagtgtggtctggccccttgctcctggagcccttcagcacatccagggaccaccatcaagacaggcactgcagggcgcagagccaacgtgctgaccaactcagaagcagaagcttaggaaccagagccccaagccaccccgatgctggcggggccaactccaggcgccgtgcctgcacagcaccacacaacaacctttgctaagtgggtcccttccttggacccagacactctcagtgactctgctcaggaggcagcgccaccatgctctggagaagaggaggccgccagagcccgggtggttttagtgggtctttccctgaggcagaaactccaaggccagggacaatgtgaccgaaggggagacaactctatggacactgtccagggatcaaagatggtcagcgtgcacccttagggtacgtttagcgagctgggctccatctctgccgctcccaggtgcgggtcccgcgtcgctgtccaggcccctcattgctgacactcccctggcttcactgggcagagtccaccggccccccagccctgggtgtggctggcccctccctacctcccatgtagctcccaggcctttacgaagcaaatctccatcctccatctccactcttggaaaatgcagctgccctgcacacccacagccccgcccccgccccaccacggaggcctatggacgccaccacgacaccacatggcagttactcggtatctgggccctggacgcgcaagaccccggaggccacaaacggtacaggaacacagccaggagtcacgctgcacacccccacccgtacctgaggcagactgggattgaaattttatttttaaaaggtaaagctgttttattaaacgtcttttaaggactgggagtatgacataacaaacttgagcaacatgtgtaaacacgtgtgaaatgcggtttgatttcagtagtttattttggagacaaagcagtgcaagaggccagccacgctttcctgttccccagggctcagggtcagaactaggaaaggtgacgtacagacattaatcggggttcaaaactcaagtcgtgtaaacgtggttagttgttgggtcctcagtttccaaaaaagccgggcagttctgatggcctctgcccctcgcccaagccctgtgcctccctcctcaaagtgggcatcctgcagcccagctgagccaggccgaaggacctccatgcactggctcgggggcctctctcgggacactcagcactttctctagcgtcctccatctcactgggcagaggacagcccggaagcctttttcactttttcaaagtaaactgctatcttaagacacaaaaacatacttgtgggggctgatgcctctcacccagcaccccacatcttccaggactgcagaggcttctccccaacccttttctctgcagagggggctgcctggatcaggggtcagacggcagagccagtgctttgctgccaaggtgatggggtgagtctgaggtgtgcagaagcgatggggggcgggtggctccctggcacctgctggctcagtgcttggggcttgcaatgagaggtggaccaggcctgctgggtgaggagggacccagcaggtgtgaaaaggagtgaacccactgggaagagggccccgatctccatggtgtcatgccgaggctcccgcgcctatcctcacctaggtgactttatggaaaggcaggctgcatcccaggggttagggcacaaagccagccctgtggtgctctctgatctcaaatgtccactagagacaagggggtggaggcccaaagacctggaatgatttgcccaaatcacagcacaaatcctcagcacaggcgccatcggctcgggcctccagccaggcagcctccttcccgggctccagggagcagcagtgctggcttaggggaaggagaccgctgtgcagggctaaatgggacgtgtgttggggggcccagaggacgcccagcttcctttccttccctttagtgagggagcacagcccagacaccagcgcggaactcccctgaggggtctgtggcctcctctggctgtggggagggaggggttagctgcacaccaggcagggtgggggctaacaaagccttggtggagaccagtaggaggaaaaacaaggaaggggcaggtcagggagtggggagtcaggcagaagggaagccactctcacatgcaccgatcagcctcccacagcccgacatgggcaggcttcccccaagggtcccggtccacagtggccatggagaccaacagacagggatgtgcacagacactggcatggcagccatacgcacacccctcacctcccatccagacctagtgttgcaaac

SEQ ID NO: 97664 - DNA, 53164 bp, Homo sapiens
aaccaaaggcatgaagctctgaaacagcttactatgtttggatatttataagctgttgttattgttggagtataaactgtaagagagagtaggaggacagaaaaaacagcctgtatgcggggggaagaaaacatttaaacagaaattctcaaaagatttgggcagccagcccctctagagaaaaacatagaatcacctagaaagggtttttcataaagtacacttttcatcacccctattctgtcacctggaatattgataacactgaagggagtgtgccttatctctcaggtgtatttggatgaaatagtttgagaaccatgcaggcaagtttaagccagtgtgttaaagagaatatgacatcagatttgcattttacaatcttccttttgataacaaagggaaccttaaagggctggaggggaagggcagacggggctaggggaggagaacccttttaaaaagctactgcaggtggggtgcggtggctcacacctgtaatcccagcactttgggaggccaaggcaggcagatcacctgaggtcaggagttcaagaccagcctggccaacatagtaaaaccccatctctactaaaaatacaaaaattagctaggcatggtagcaggcacctgtaatctcagctacttgggaggctgaggcaggagaattgcttgaacctgggaggcagaggttgcagtgagccaagattgtgccgctgcactccagcctgggcaagagagtgagactccatctcaaaaaaaaaaaaaaaaaagctactgcagtagatcaggaggaggcacagtgataaagagaagatctgagctatgaagtggcagtcaagatgattaaaggaatatataggaagtacagttgatagaacttagcaagtgattaggtaaatgaagtgctagagaaaataaaggggatatttttcaattgtttttagcattttggcaaaaaattatttaggaatgaaattgatgctagtaactaagagtatgaacttcccacattagctggtaattttgatcacccttgttctccatgaccataaatattttagagttgctatgaagacaagaatgtttatttcctgagtagctgtcagttgtcactatgaaacatgaaaataaatatcagtttgctatgtctaggtattccgatatttatccacaattattccttaagatatattagtatttttatagatagatagatagatagatagaaataaacacattttaatttttgtttccatgctctttagaattcaactagagggcagccttgtggatggccccgaagcaagcctgatggaacaggatagaaccaaccatgttgagggcaacagactaagtccattcctgataccatcacctcccatttgccagacagaacctctggctacaaagctccagaatggaagcccactgcctgagagagctcatccagaagtaaatggagacaccaagtggcactctttcaaaagttattatggaataccctgtatgaagggaagccagaatagtcgtgtgagtcctgactttacacaagaaagtagagggtattccaagtgtttgcaaaatggaggaataaaacgcacagttagtgaaccttctctctctgggctccttcagatcaagaaattgaaacaagaccaaaaggctaatggagaaagacgtaacttcggggtaagccaagaaagaaatccaggtgaaagcagtcaaccaaatgtctccgatttgagtgataagaaagaatctgtgagttctgtagcccaagaaaatgcagttaaagatttcaccagtttttcaacacataactgcagtgggcctgaaaatccagagcttcagattctgaatgagcaggaggggaaaagtgctaattaccatgacaagaacattgtattacttaaaaacaaggcagtgctaatgcctaatggtgctacagtttctgcctcttccgtggaacacacacatggtgaactcctggaaaaaacactgtctcaatattatccagattgtgtttccattgcggtgcagaaaaccacatctcacataaatgccattaacagtcaggctactaatgagttgtcctgtgagatcactcacccatcgcatacctcagggcagatcaattccgcacagacctctaactctgagctgcctccaaagccagctgcagtggtgagtgaggcctgtgatgctgatgatgctgataatgccagtaaactagctgcaatgctaaatacctgttcctttcagaaaccagaacaactacaacaacaaaaatcagtttttgagatatgcccatctcctgcagaaaataacatccagggaaccacaaagctagcgtctggtgaagaattctgttcaggttccagcagcaatttgcaagctcctggtggcagctctgaacggtatttaaaacaaaatgaaatgaatggtgcttacttcaagcaaagctcagtgttcactaaggattccttttctgccactaccacaccaccaccaccatcacaattgcttctttctccccctcctcctcttccacaggttcctcagcttccttcagaaggaaaaagcactctgaatggtggagttttagaagaacaccaccactaccccaaccaaagtaacacaacacttttaagggaagtgaaaatagagggtaaacctgaggcaccaccttcccagagtcctaatccatctacacatgtatgcagcccttctccgatgctttctgaaaggcctcagaataattgtgtgaacaggaatgacatacagactgcagggacaatgactgttccattgtgttctgagaaaacaagaccaatgtcagaacacctcaagcataacccaccaatttttggtagcagtggagagctacaggacaactgccagcagttgatgagaaacaaagagcaagagattctgaagggtcgagacaaggagcaaacacgagatcttgtgcccccaacacagcactatctgaaaccaggatggattgaattgaaggcccctcgttttcaccaagcggaatcccatctaaaacgtaatgaggcatcactgccatcaattcttcagtatcaacccaatctctccaatcaaatgacctccaaacaatacactggaaattccaacatgcctggggggctcccaaggcaagcttacacccagaaaacaacacagctggagcacaagtcacaaatgtaccaagttgaaatgaatcaagggcagtcccaaggtacagtggaccaacatctccagttccaaaaaccctcacaccaggtgcacttctccaaaacagaccatttaccaaaagctcatgtgcagtcactgtgtggcactagatttcattttcaacaaagagcagattcccaaactgaaaaacttatgtccccagtgttgaaacagcacttgaatcaacaggcttcagagactgagccattttcaaactcacaccttttgcaacataagcctcataaacaggcagcacaaacacaaccatcccagagttcacatctccctcaaaaccagcaacagcagcaaaaattacaaataaagaataaagaggaaatactccagacttttcctcacccccaaagcaacaatgatcagcaaagagaaggatcattctttggccagactaaagtggaagaatgttttcatggtgaaaatcagtattcaaaatcaagcgagttcgagactcataatgtccaaatgggactggaggaagtacagaatataaatcgtagaaattccccttatagtcagaccatgaaatcaagtgcatgcaaaatacaggtttcttgttcaaacaatacacacctagtttcagagaataaagaacagactacacatcctgaactttttgcaggaaacaagacccaaaacttgcatcacatgcaatattttccaaataatgtgatcccaaagcaagatcttcttcacaggtgctttcaagaacaggagcagaagtcacaacaagcttcagttctacagggatataaaaatagaaaccaagatatgtctggtcaacaagctgcgcaacttgctcagcaaaggtacttgatacataaccatgcaaatgtttttcctgtgcctgaccagggaggaagtcacactcagacccctccccagaaggacactcaaaagcatgctgctctaaggtggcatctcttacagaagcaagaacagcagcaaacacagcaaccccaaactgagtcttgccatagtcagatgcacaggccaattaaggtggaacctggatgcaagccacatgcctgtatgcacacagcaccaccagaaaacaaaacatggaaaaaggtaactaagcaagagaatccacctgcaagctgtgataatgtgcagcaaaagagcatcattgagaccatggagcagcatctgaagcagtttcacgccaagtcgttatttgaccataaggctcttactctcaaatcacagaagcaagtaaaagttgaaatgtcagggccagtcacagttttgactagacaaaccactgctgcagaacttgatagccacaccccagctttagagcagcaaacaacttcttcagaaaagacaccaaccaaaagaacagctgcttctgttctcaataattttatagagtcaccttccaaattactagatactcctataaaaaatttattggatacacctgtcaagactcaatatgatttcccatcttgcagatgtgtaggtaagtgccagaaatgtactgagacacatggcgtttatccagaattagcaaatttatcttcagatatgggattttccttctttttttaaatcttgagtctggcagcaatttgtaaaggctcataaaaatctgaagcttacattttttgtcaagttaccgatgcttgtgtcttgtgaaagagaacttcacttacatgcagtttttccaaaagaattaaataatcgtgcatgtttatttttccctctcttcagatcctgtaaaatttgaatgtatctgttttagatcaattcgcctatttagctctttgtatattatctcctggagagacagctaggcagcaaaaaaacaatctattaaaatgagaaaataacgaccataggcagtctaatgtacgaactttaaatattttttaattcaaggtaaaatatattagtttcacaagatttctggctaatagggaaattattatcttcagtcttcatgagttgggggaaatgataatgctgacactcttagtgctcctaaagtttccttttctccatttatacatttggaatgttgtgatttatattcattttgattcccttttctctaaaatttcatctttttgattaaaaaatatgatacaggcatacctcagagatattgtgggtttggctccataccacaataaaatgaatattacaataaagcaagttgtaaggactttttggtttctcactgtatgtaaaagttatttatatactatactgtaacatactaagtgtgcaatagcattgtgtctaaaaaatatatactttaaaaataatttattgttaaaaaaatgccaacaattatctgggcctttagtgagtgctaatctttttgctggtggagggtcgtgcttcagtattgatcgctgtggactgatcatggtggtagttgctgaaggttgctgggatggctgtgtgtgtggcaatttcttaaaataagacaacagtgaagtgctgtatcaattgatttttccattcacaaaagatttctctgtagcatgcaatgctgtttgatagcatttaacccacagcagaatttctttgaaaattggactcagtcctctcaaactgtgctgctgctttatcaactaagtttttgtaatattctgaatcctttgttgtcatttcagcagtttacagcatcttcattggaagtatattccatctcaaacattctttgttcatccataagaagcaacttcttatcaagttttttcatgacattgcagtaactcagccccatcttcaggctctacttctaattctggttctcttgctacatctccctcatctgcagtgacctctccacggaagtcttgaactcctcaaagtaatccatgagggttggaatcaacttctaaactcctgttaatgttgatatattgaccccctcccatgaattatgaatgttcttaataacttctaaatggtgatacctttccagaaggctttcaatgtactttgcccggatccatcagaagactatcttggcagctgtagactaacaatatatttcttaaatgataagacttgaaagtcaaaagtactccttaatccataggctgcagaatcaatgttgtattaacaggcacgaaaacagcattaatcttgtgcatctccatcggagctcttgggtgactaggtgccttgagcagtaatattttgaaaggaggttttggttttgttttttgttttttttttttgttttttagcagtaagtctcaacactgggcttaaaatattcagtaaactatgttgtaaaaagatgtgttatcatccagactttgttgttccattactctacacaagcagggtacacttagcataattcttaagggccttggaattttcagaatggtaaatgagtatgggcttcaacttaaaatcatcaactgcattagcctgtaacaagagagtcagcctgtcctttgaagcaaggcattgacttctatctatgaaagtcttagatggcaccttgtttcaatagtaggctgtttagtacagccaccttcatcagtgatcttagctagatcttctgcataacttgctgcagcttctacatcagcacttgctgcctcaccttgtccttttatgttatagagacagctgcgcttcttaaactttataaaccaacttctgctagcttccaacttctcttctgcagcttcctcattctcttcatagaactgaagggagtcaaggccttgctctggattaagctttggcttaaggaatgttgtggctgacgtgatcttctatccagaccactaaagcgctctccatatcagcaataaggccgttttgctttcttacctttcatgtgttcactggagtaatttccttcaagaatttttcctttacattcacaacttggctaactggcatgcaaggcctagctttcagcctgtcttggcttttgacatgccttcctcacttagctcgtcatatctagcttttgatttaaagtggcaggcatacaactcttcctttcacttgaacacttagaggccactgtagggttattaattggcctaatttcaatattgttgtgttttagggaatagagaggcccagggagagggagagagcccaaacggctggttgatagagcaggcagaatgcacacaacatttatcagattatgtttgcaccatttaccagattatgggtacggtttgtggcaccccccaaaaattagaatagtaacatcaaagatcactgatcacagatcgccataacataaataataataaactttaaaatactgtgagaattaccaaaatgtgatacagagacatgaagtgagcacatgctgttgaaaaaaatgacactgatagacatacttaacacgtgggattgccacaaaccttcagtttgtaaaagtcacagtaactgtgactcacaaaagaacaaagcacaataaaacgaggtatgcctgtatttttaaaaaaagctttttgttaaaattcaggatatgtaataggtctgtaggaatagtgaaatatttttgctgatggatgtagatatatacgtggatagagatgaagatcttaattatagctatgcagcatagatttagtcaaagacatttgaaaagacaaatgttaaattagtgtggctaatgacctacccgtgccatgttttccctcttgcaatgagataccccacactgtgtagaaggatggagggaggactcctactgtccctctttgcgtgtggttattaagttgcctcactgggctaaaacaccacacatctcatagataatatttggtaagttgtaatcgtcttcactcttctcttatcacccacccctatcttcccacttttccatctttgttggtttgcaacagccccttctttttgcctgactctccaggattttctctcatcataaattgttctaaagtacatactaatatgggtctggattgactattcttatttgcaaaacagcaattaaatgttatagggaagtaggaagaaaaaggggtatccttgacaataaaccaagcaatattctgggggtgggatagagcaggaaattttatttttaatcttttaaaatccaagtaataggtaggcttccagttagctttaaatgttttttttttccagctcaaaaaattggattgtagttgatactacatataatacattctaattccctcactgtattctttgtttagtttcatttatttggtttaaaataattttttatcccatatctgaaatgtaatatatttttatccaacaaccagcatgtacatatacttaattatgtggcacattttctaatagatcagtccatcaatctactcattttaaagaaaaaaaaattttaaagtcacttttagagcccttaatgtgtagttgggggttaagctttgtggatgtagcctttatatttagtataattgaggtctaaaataataatcttctattatctcaacagagcaaattattgaaaaagatgaaggtcctttttatacccatctaggagcaggtcctaatgtggcagctattagagaaatcatggaagaaaggtaattaacgcaaaggcacagggcagattaacgtttatccttttgtatatgtcagaatttttccagccttcacacacaaagcagtaaacaattgtaaattgagtaattattagtaggcttagctattctagggttgccaacactacacactgtgctattcaccagagagtcacaatatttgacaggactaatagtctgctagctggcacaggctgcccactttgcgatggatgccagaaaacccaggcatgaacaggaatcggccagccaggctgccagccacaaggtactggcacaggctccaacgagaggtcccactctggctttcccacctgataataaagtgtcaaagcagaaagactggtaaagtgtggtataagaaaagaaccactgaattaaattcacctagtgttgcaaatgagtacttatctctaagttttcttttaccataaaaagagagcaagtgtgatatgttgaatagaaagagaaacatactatttacagctgccttttttttttttttygctatcaatcacaggtatacaagtacttgcctttactcctgcatgtagaagactcttatgagcgagataatgcagagaaggcctttcatataaatttatacagctctgagctgttcttcttctagggtgccttttcattaagaggtaggcagtattattattaaagtacttaggatacattggggcagctaggacatattcagtatcattcttgctccatttccaaattattcatttctaaattagcatgtagaagttcactaaataatcatctagtggcctggcagaaatagtgaatttccctaagtgccttttttttgttgtttttttgttttgttttttaaacaagcagtaggtggtgctttggtcataagggaagatatagtctatttctaggactattccatattttccatgtggctggatactaactatttgccagcctccttttctaaattgtgagacattcttggaggaacagttctaactaaaatctattatgactccccaagttttaaaatagctaaatttagtaagggaaaaaatagtttatgttttagaagactgaacttagcaaactaacctgaattttgtgctttgtgaaattttatatcgaaatgagctttcccattttcacccacatgtaatttacaaaatagttcattacaattatctgtacattttgatattgaggaaaaacaaggcttaaaaaccattatccagtttgcttggcgtagacctgtttaaaaaataataaaccgttcatttctcaggatgtggtcatagaataaagttatgctcaaatgttcaaatattttgattgcctcttgaattcatttgctaattgtatgtgtgtgtgtttctgtgggtttctttaaggtttggacagaagggtaaagctattaggattgaaagagtcatctatactggtaaagaaggcaaaagttctcagggatgtcctattgctaagtgggtaagtgtgacttgataaagcctttggtcttaaatcttgggcattttgatttgtaaatctgaccctgagaattgggttacccagatcaaagactcatgccagttaaaaagaacattacctgtattttttatcatgtgttatctcttaagaagaggcagattagttctaaaatcaacaaattgtatttaattgaaataatttagtgatgaggaagaggtccattctagtgcctgctaaatgtataatccttcttagaatgtgaagttgtccttaaacttttaaataccttcagttaatctttatattgtcatttatgaaaaccttgaactaagacttatgtatctttcatctagctctggttttaatgcaggtagcatttaattgtccccactgtactgggtatagtctgctaaacattaaggagtagttttgcatctctccttgttctgatactagggtcaaagcccactttttatagatgggcagcaaaaggcacattggacatgctgataaatgttgccctaattgtgatctaaacatgataaaatatacatacataagtgcccttatctgctgcaagtgacccttgttttgttttggttggggtggggggtgtttgggatggaatggtgatccacgcaggtggttcgcagaagcagcagtgaagagaagctactgtgtttggtgcgggagcgagctggccacacctgtgaggctgcagtgattgtgattctcatcctggtgtgggaaggaatcccgctgtctctggctgacaaactctactcggagcttaccgagacgctgaggaaatacggcacgctcaccaatcgccggtgtgccttgaatgaagagtaagtgaagcccagggcctctcccctctttgcggccactgataggaaagcccaatctttggttgaaaggaagagagttcagcgtgcacttttacatttataaaatgggcatcaaaatgcctgtttggcagtcatgcgataagaagttgtatttgctaatgtgaataacttgagatgatttcattatctgaattgtacagtttagccattaattaggagcagtcagagtgtctgtaaccacatggcctcagttataccataaacttgaaattgtttatgtgctcacatgctacaagtgacggctcctgtgtgcctggccactatattagtatgtattgactccacttccatgttgcagtatctgaaacagaaagtaagtctaatgagaaactttgggattcccaggtcaaataccttccatatgtatgtagcaaaaacaaaatacaaagcctagaagttctgtagaaatagaactgatttttactttcattcaaactattcattatttccacaatagtaatcaaaactgcttctacttttactgctgctaaatgatcagcaaattactggatatggatatatattattttccaggaatataagaatttagaatagaactgcaagagtatgcacttaaatatatttagtgcatccagttgctaatgttttgttttaaacaccatccactttgcatgaagtctaaaccttcagttggaaaaagcctcatttttaatattcctctactgtgctgataatcctgtataacactaaaagaatagatgaatgttcacggtgctacacagaaatyttttttttttttttttttgagatggagtttcgctcttgttgcccaggctggagtgcaatggcgcgatcttggttcaccgcgacctccacctcccaggttcaagagattctcctgcctcagcctccctagtagctgggattacaggcatgtgccaccacacccggctaattttgtatttttagtagagacagggtttctccatgttggtcaggctggtctcgaactcccgacctcaggtgattgcccacctcggcctcccaaagtgccttacaggcatgagccgccgcgcctggccagaaatcttacaagttattttgcccacgattggttttaaaataattttaattttgcactatttcctttagtgtctttttctctgcatccaccaaactatagaatcatttgctgagcttataagaaatgctcatactgctcattgcaacagctagccaaatttgtcctttgctgtttaaaactctaactagcatggttttactaaatttatgttaacacagtttctctctctgggttgtggggagacaaatcaattataaataatctctttagaaaagttactctttctatatgaaagtgtgacttgactttctatgataattatgatccaaaaattttatggtgtgtacctgaccacttttacaaatgattaattggaaggtagaaattgctgattcataacatgtaacttataaacttatgatggactactttaagcataaattttttttttttttttaagacagagtttcactctgtcacccaggctggagtgcaatggtgcgatctcggctcactgcaacctccatctcctgggttcaagcaattctcctgcctcagcctcccgaatagctgggattacaggcatgcactaccacacccagctaattttgtatttttagtagagacagggtttctccatgttgatcaggctggtctggaactcctgacctcgggtgatccgcccgcctcggcctcccagagtgctgggattacaggcatgagccactgtgcccagcctgaaatatttttttaatctaccctgactcctcttgctctttctgaagaaaaatttttaaaaatgtatgtaggtgcctttaattagaaaaaaaattaaaaattaaggcaacttgtgctcatattggtaatagcatttctttcaagaactcagtaatactgcattgtctttaaagcataatatctcttagacttgacggtttgagattctaaatcactgaagaacctcttgtgaaaatgatagttttaaaatttcttttcaaaaatagtcctattgcaaaatgtttgattttcttgaagtttcctggaaactatatttcattcattgtaatgaatttaattttcattaacatagatctctaatatttttctcagctcaccacaacctccacctcccgggttcaagtgattctcatgccacagcctcccgagtagctagaattacaggcacccacccggctcatttttgtatttttagtagagacagggtttcaccatgttggccagattgatctcgaactcctggcttcaggtaacccacccaccctggcctcccaaagtgctgggattacaggtgtaggccaccatgcccagccagcttttccataattcttataaatgccaatgcctgaaatggaatctgacatataaaaaattacatgaagaacttttattattttgcatttgaaaaccatgaaaaatagttggaccagagtctcagaaagcttgtagtttgttagtttaactgctctaaatgtcaggcagatacaaaactattaaaagacatgcttcaaatatgaagacaatttaaaagcacagctgtacacttttgctttttgtctagtttcaaggtaaagatgaataatcatttagataatgcttaagctatgcttatgcatacttagagcaattctccaaaataaaaaattttaatacttaaatacatgattaaaatagacacgtatccaatgtcaatacagactttactcagaaatagcttttgaagtttcttctaccccataaatagattttattttatggctggcagaaatgaaaattacaactttttgccaagaacagagaatagaataatctcaaattggggctgcggactcagttttatgttcaaagctgtgtgaacctcatcactgagttcttacaaatccctgtgtccacatgctccaaaccacccactgtgagttcagaaaagaactctgagtgcatctttcagtaggaaagtaaaaactgatttttacatttcctttgagccaaaccagctgtttcttctttaaagatttccctttgagatttccattttatgactaagtctaaccagtatttttttggcaagtaagagttgtgggagtgtatctgtcatcataaggaaatcaaagccagaaatgccttctgccatggtgggtgatgttaaacatttcaaggaactttatattataaaaattgtcaaacataaaaggaaaagtgcaatataatgaattccatggacccatcacacagcatcaatatttatcaacattttatcaatattttttcatatatttttcccacatccactcccactagtgtttgaaagcagaagacagataacttaccatcttacctgttaacatttcaggatgtatttctaacaggtaaagactttatcatttaatatttagactgtgtttgttcaaattatctgattagattctatttcagaaaacacacacataaacaaaaatgataatgagaaaaagaaagcccttccacatgattgacacttctgagtagtgtgatcccagttcatgtccattgtctgggatagctattaaataaaacttcctctcataaaattctctccatttagaagataaattctgtgattcacaagcctctttttatttataatagcccttcccctttctttatgaatttgaatttgttttttaaagaaastgtgattttctctgtaaaattccccacattctggatttggccgatttcatcttggttcttttghttaacctattcctctatccccagtatcttctgtggactggtagtttgactggttctttttcttttcttttttttttttttttttttttttgagacaggctctcgctctgtcgcttaggctggagtgcagtggcccaatctcagctcactgcaacctccacctcccaggttcaagctattctcatgcctcagcctcctgagtaactgggactgcaagcatgtgccacctcatcctgctgatttttgtacktttagtagagacggggtttcgccatgttggccaggctggtctggaactcctggcctcaagtgatccgcccaccttggcctcccaaagtgctgggattacaggcatgagctatcacgcccagctgatttttaagtaatataagtatgtgtgcatgtatagtatacattggcaaaaacacttcataagtagtgctaaaatcatcttatttatatacatcaggagacacataatgtctgtttgtttcccattttagtgatattaagagtgtttagcatgtttagttgtcagcctgatccatcattatgttcttcatcaaactttcaccagatagtttcacatcaattgatgatcattgcctgtttctattattttgttttcaagttgacagttttctctcacttgatgttgtgtaaatttagttatataaagttaaattattttgctattttttctatgctgtatacatttgaataactgacctaatttttactttaaaaatattttacaattagaagtccaaatagtaaatcaaaggttaagaatttttgcagaaatctgttatatagatgacattttaatatttgccctttatatcatttaccatgagccaaatttcaagtcatattaaaatgactgtcatgtgctaattctaacaatatttgaaagacccctatcaaaataaatataccttttagtagccactttattagaaaatcaactttaagttattcccccatgtttttttctaattgagatataattcacataccataaaatttacccttttaaagtatacaattcagttgtttcagtacattcacaaagctatgcaaatgtcacctctacctagtttcagaacgttttcatcattcccagaaggaaaccctgtatttattaggcagtcacttccccttctccccttcttccttcctctaagtggcaaccacaaataaacattcagtttctctggatttacctattctgggcattttgtattagtgaaatcatgtatttggcctttctctctggcttctttcatgtacctcaatgttttcaagtctcattcattttattaaaaaaaaaaagtaccttttttctttttcttttttttttttttgtccacgtatatattcacaccacattttttgagacagagtctcgctctgttgcccaggctagggtgcaatggtgcaacctcagctcactgcaacctctgtctcccgggttcaagtgattctcatgcctcagcccccaagtagttgggattacagttgtgcaccaccacacccagctaatttttgtatttttagtagagacagggtttcaccatgttggctaggctggtctcaaactcagcctcaagtgatccttctaccttagcctcctaaagtgctgggattacaagcatgagccactgtgcccagccacattttctttttccatttattagttaattgacatttggatcgtttctactttttggcgattataaattatgctgcaatgaacatcggtgtacaagtttttgtgtgaacatgttttcagttaccttgggatatacacctaggagtgacattgttagtaatatggtaactttatgtttaactttttgaagaactgccaaactgttttccaaagtagctttatgcttttacatttctgccaacaatgtatgaaggttccagtgtatctccacatcctcaagaaaatgttattgtctttttaattgtaaccatccaagtgggtatgaagtttatctcgtgattttgatttgcattttcctaatggctgatattgggcatcttttcacgtgtgtattgaccatgtatttttttgagaaaagtctacttatatgtttttaattgtattatttttagagttgtaagaatatgttatgttgatacttgaactttgtcaaatgcctggtttgcagatattttctcctatcccacaggttgtcgcttcactttgataatgtccttaaagtacaaaagttttaaattgattttgatgaaactcaatttctttttaattggcagcttgtgcatttggggtcatatttaagaaatcattgcctcattcaagatctgaaagatttacacctatgctttcttctcagagtattataactttagttcttacatttagatttttaattaatgttgagttaatttgatggtgagagataagagtccaacttcattcctttgcaagtagctgtccagttttctcagcaccatttgttaaaagactgttttttttcaattaactgaccaagatgtatgggtttatttctggactcttaattctgttaatctgcatgacttttcttatgccagtaccacactgtgctgattcctgtagttttgtagtaaattttgaaatcaagacaggtaagtcttccaactttgtacttttgcctaccatgtttcttgggtttccatatgcattttaagatcagcttctccgtttcctttctggatttttttttttttttttttttttttttttttggkggagctggagtcttactatattacccaagctggttttgaactcctggctaaagagatcctccckcctaggcttcccaragwgctggggttacaggcatgagccaccacatccaacccccttctgggactttgactggggttctgttgaatctgttggtcaatttggagagtattgatatcttaacattaaagcttccaatttatgaacacaggctatttttccatttattcttaaatttctttcagtaatgttttggatgaaacatgtacaaagtcctgcactttttattttttttaagacagagtcttgctctgctgcccagtccagagtgcagtgctgccatctcagctcactgcaacctccacctccgggttcaagtgattctcctgcctcagctggaactacaggtgcgcgccaccatgcctggctaattgttttgtgtttttggtggagacagggtttcaccatgttggccaggctggtctcaaacacctggcctcaagtgacctgactgccttggcctcccaaagtactgggattacaggcatgagccaccacgcctggcctgtacttctgttaaaattttttctatgtattttttttatcctattgcaaaatcaaattttttgttgataatatatggtcataaatttcatttttatatattggtctcatatcctaccaacttgctgaactagcttattagcactaactttttttggtagattccttaggatttgctgcatacaagattatgtcatctacaagtagagatagttttgtttcttcacttccaatctgggtggctttatgtttttttcttgcctgattacccagttagaacttccagaaaatgtcaggtacaattaacaactgcaracatccttgtcttattcattttagaaagaaatttttagtttttcaccattaagtatgatactagttgtaggttttgtttaaaaaaagactgtgtcaagttcagaagttcccttctgttgctagtttgttgaataattttatcacgaaagggtgttgaacttttctcaaatgctgtggctacatctaatgaaatgatcatgcgttcttctcctttattctattaatatggtatattatattgattcatttttatacattagattaacattatatttctggaataaatcccacttggcctcagtgtgtattactttttatatattgctggagtctgtttgcaggtatttcattgaggactttcgcatctctgttgataaggtatactgatctttagttctcttgtgatatctttggttttggtgtcagagtaattctgagttcacaaaatgcattgggaaatgttcccttctctatcttttggaagagtttacaaaggattggtttaactcttttttaaatgtttgaggaaattctctacccctgggctttcctttgtgggaatttttaaacatttttaaaatagattatttttaaagcaattttagggtaaaagcacattgaatgaaaggcacagagcttccttaagtacatgctgcccctgtatgtgcatagcctccctcattatcaacatcctttaccagaatggtacatttgttgcagtcaatgaacctgcattgacaattgtcgmtgaaagttcatagtttagagttcacctttggtgttatgtattctgtgagtctggatccatgtttaatgatactcattcaccattacagtatcattcagagtaatttcactgccttaaaagtcctctgtaccctacctatttttctctcctaccccactaacccttagcaaccaatgatctttttatctcaataattttgcctattccagaatgtcatatagttggaatgatacagtatatggagccttttcagactggtttttgtcacttagtaataagcttttaaattttccaccatgtcatgatcgttcatttcttttcagcattgaataatattccattgtctggtttatcacagttgatttatccattcacatagtgaaagacatcttagttgcttccaagttttgacaattatgaataaagctgttataaaagtatgtaggtttttgtgtggacaaaagttttcagctcctttgagtaaataacacagagcacagtagcttgattgacagtaagagtaagaaatattttttctcagtctgtgtcttattttttcattcacttgacagtgccatttgcagaacaaacagaaagttttaattttaatgaagtctaggttatcagttaattcatgaataatgtttttggtattgtatctaaaaagtcaacaccaaggtcatctatatgttctgtgttatcttccagaaattttatagttctgcattttacatttagggctgtgacccattttgcattaattttgcaaaagctataaagactatgtatagattcacttgtttgcatgtggagttgtccagttgttcccgtaccatttcttaaagactatctttgctttattgtattacctttgctactttgtcaaagatcagttgattataattaagtggtctgtttctggactctttattctgttccattgatatatttgtctagactttcaccaataccacactatcttgttaacttaggctttagagtaagtcttgcaatcatgtagtgtcagtcctctgacattgtttttctccttcagtattgagttggctattcttttgcctattactaagtaaaaaaagcagtctgaaaaggctatatatacagtcatttattggtcttttgcctcttgatataaactttaaaattactttgtcagtatcctcaaaatcttgcaggaattttgatagattgcactgcatttctagattgagttagaaatactgccatcttgacaatacacatcttcctatccatgaacatggaacatctctttcttggatatccttcattagaattttgcattttccccatatagaccatgtacatattagatttatacataaatatttcatttgggggggtgctaatggtaatgtatttttatctcagattctgcttgtacattgctggtatgcagaaaagtgatcaacttttgtatattaaacttgtttcctgcaaccatgttatataatcactttagatccagtttttttttttttggtcattctttcatattttctaggtgatcatgtcatctagcaaagacaacttctttctaatctgtataccttttattttcttgtcttaatgtattagctagcatttccagtatgatgttgaaaggcattggtgagaggcaacatacttgccttgttcctgatctcagcaggaaatcttcaattttatgttagctctatggttttgtagatattctttatytacattaaatatgttagctgtatggttttgtatatattctttatcaggttcaggtagttcccctcttttcctagtttactgagaggcttttgaaaatcattaatcagtgttggattttgtaaatactttttttccacctattgatattaccatatgatttttctttagcttattaacgaaatggattacattaattgattttcaaattttgaactagactggcatacctggagcaaatcccacatggttgtgatacattatttatgaatgcattcatggtcatggttgctattagtctgtagttatcttttattgtaaagactttggtgttggtattaaggtaatgctgccctcatagaataagttatgaagtattttctctgcttctgtcttaattgagattgtagagaattcatataatttcttccttaaaactttggtagaaatcagaatgaaccatctgtgtctggtactttgttttgaaaagttattgctgattcaatttctttcatagatataggcctatttagattattattttgcataaatattggtagttgtgtccttcaaggaattggtccatttcaccttgattattaaatgtgtgggcacatttgttcataatatttctttattatcctttgtttttgagacagggtctcactctggttgcccaggctggagtgcagtagtatgatctcagctcactgcagccttgacttcctgggctcaagtgatttacccacctcagcctcccaagtagctcggactacaggcacatgccaccatgcctggctaatttttttattattattagagatggagttttcctatgttgcccagtgtggtcttgaactcctggactcaagcaatctgcctgcctcagcctccaaagagtgatgggattgcaggcatgagccatcacacctagcctgatggcagaactttttaggaacaatagaatggtatatggcattttcaaaaattgttttcccctcctcctatggaagcatgaagggatttttctctagtattcattgtgagaacctcatctggctcctgaatgtagaaaactcacaaaactgtgaggaacctattatgactggatgcctttggagttgttcacactgaacctccagcaattcatcaattatatttcagattttcctatcccaacactggttcctacagaggtttctgctccagtaagctgtaattctttttatccatctgcttccttggttgtgagggcagtgattttccctgtgacctcatttctctgacagatctaagtagtcttgattacatcttttaacctgttgtaggtatattcagattttctatttcttcttcagtcaattttagtagtttgtgtttttctagaagtttgttctctagctctgctttagctccatccaataaaatatgagtatgtcgagttttcatttacaacaaggtattttctaatttctatcatgtttttttgattcctgactgtataggagtatatttttacctattacccaaatttgcttgttattcatgtataattttatcagaaaacacactttgcacaatttttgcagtgttacatttatttagacttgttttataacttgacatacagtccatcctggagaatgtttcacgtgtgcttgagaagaatgtgtatattcagctgttggtgggtggcatgttttatagatgtctgttagacctagttggtttatagtgttttttacaacttctgttttctttttaatcttctatctacttttagccattattgaaagtggattagtaaattatctatttattcctttaattctgccattttttgcttcatgtattttggtgctctgttgcttattacatgtatgtttacatttgttacatcattttaatggcttgaactttttattataaaatgtgtatatcttgtagatatcgtatagttaaatctttttaaaaattgatattgctagtctttgccttttaatttttcaatttatatacatttaacataattattgataaggtaggatttgtctgccattttgtctgtatcttgtctttttttgtgttcaatagatattttctagtgtactgttttaattcccttgtcttttactaaattttttgatgttatgttcttaatggtttccctggggattacaactaacttataacagctagtctgaagtaataccaatttcattacaatataaggaaactttgttcccatatagctacattccctctttttactctgtgctattatacaaattacattttattttatgcccattaacacagattatgttttttcttttaaatcagattgatattgtcatttaaatcaaatatgagaaaaatagttacaaaaaaatacatatatgatttcatatttacctatgtaattatctttactggtgctctttaagttcttaggtgtatttgaggtactgtctagtgtcctttcctttcagcctgaagtatacatttagtattttttgtaggacatgcctgaaaacaataaactcttatttatcagagaatgtcctaatttattatataatacatttctgaaagatagttttgcaaaatacagaattcttggttggcagtctttttcttgtggttctatgtcattctactgccttctggtcttcattgtttctgatcagagatcagctattaatcttattgggaatcctgcatacatgataatcatacagttttcatgattttcttgtgttggctttcagcagtttggttatgatgtttatatgtatgcatatctttgggtttatgttacatggagttagttgagcttcttggacatgtagattgatgttgttcatcaaatttgagaagttttcggccattatttttcaaatattcttcctattctttattcttcatcctctactttggggacctgcattatrtctatgttggtatgctttatggtcttccacagatctctgaggttctgtttatgttttcatttttcagactgaataatctcaattgacttatcttcaagtccctttttcccctccttttcaactctgctattgaacccctctaatttttactgcagttattacactttcagctttagaattctatttaataatatctttttcttgagtttatctcatgtatttaataaaatgctgtagtcttactttagttatttaaatacagttttctttcattatttgggcatacatgaaatagctgacttaaagtctttgtccagtggcctaacatctggactttttcaggaatagcctctattgactactttataggggccatactttgtttctgtttctcttaattgtttagmcattttaaactaatgtaatggctgagagcagtggctcgtgcctgtaatcccagcacgttgagaggccaaagcaggagcatcacttaagcccaggagttcaagactagcctgggcagcatagtgagaccctgtctctacaaaaataaaaataaataaaataatataatctggtaaatctgaaaaycagattctaccccctgcccagaatatgttactgtttctggtggttgttgtttatttctttttaactactcctataaagtttgtattgtttctcatagatagccatcgaagtctttgcttggttaacttagaggtcagctaaggattagacagaattccttaggtgcctgagatcaataagtcagtctttgacaaaggggtctgtatgtgtgttggggcatgcattcaacactcagccaggctatttgcagctctggattagcctttattccctgcttgtgcagagtctcaaggttagactgtggtgagagtttagggctttctgaggtcttttgtgggccctacagttgcatgtggctttctaaattcccaggaatatattttcaaagcctcctgtggatcatctcatttcccaggtaatttacttttragcttttttagttatcttatgttttgctccagttattagctacacctgagtcagtgacaatattcaacagctgcctatgattatttgacaaatgcctctgtggaaaaggtggttcacactaggtgaactccaagttagataaagtaaagataaccttactagtgggatcttccaggaaactaccaaacaggtcaaataatgtaaggtctctgtgaatgggactttagagtatatccaaccagtctagagtatatccaaccaatctggcctcctctagtggcagcctggctgctgcttttcataataaatgtgggctgttttgatttgaaggctaccatagagctgtggggaaagttaaaataccacagagctcactcttctcactgaaatcctgtctttttttcccttgaacaaattctccctatattgctgcaagctttttgctaatttccagatctgaaaaagctgattctgacaatatttatcagtacttttattgcttttatggaggataaaattttcagagatccttattctgccatttttgctgacatgtgtaaagtgatcatttctaattgtaaaattccttttgcatttattagctggaatactttacaggacttttcctcatcaacygttagttaccatttaatatagtttgtaagaatgatagaataaatgcatggcaagaatctttacttctcaaatttcagagattttgatgggaaattatatttagagatcacaatcagtgtctagatgtgctccctgctatggaggtgtcattacttttaggcttttttaatgggcaaatacatgaagtaattattttttagaaagaaaatctgagattaactcaaatcattaattcatactgatttttcctattcatagttgacagagtattattatcttttgttctgcttctcttgtacactgaaattcttggtttttgatattaacaattatttacttatatcacaatatacatacattaatttaaaaataatttacagtgctacctgaatattttttcttgtaagttgttttatctctctttgcttacttgtatgtttgtttattgtcattagaatgtatcaaactagggctataaagctgtaatactatattttagccagaaactaggacctagcactcaaatgcccatcaatggtagaataattcatcacatttttataagatggaatatggtactcaatgaaaatgaataaagtacaactacatgcagtgatttggatggatatcccaaacataatggaaaaagcacacacaaataagcttatattatataattccatatacctatgtatatatcaagtataaaagtaggcaaaacaagcyactgatggtggcacacacctatagttccagctatttgggaggctgaggcgggaagatcacttgagcccagaagttcaggttcaacctgagcaacatagcaagaccccatctgtaaaaaagaaagcattattaacataaaaataggcagaactactatattcttagagaagttactgttagggagacagacagtgagtgactgaaaggcaaaatgaggggaaattccaggggatagtaaatattttgtttcttagtgtgggttctacttaactgggtattttccatttgtaaactgtaaaattatgtgcacttttctgtatgtgtattacattgcaataaaattgtttaaaagtcaattgaaatagttctgtgtgtggttatgccacagcttaatacagagttagattagacttcttttcaaactcattttgcatatagacacctataatatcagctgcacagcctatataatgctatccatagcaatgaatttggtcttttgatttttcaggagaacttgcgcctgtcaggggctggatccagaaacctgtggtgcctccttctcttttggttgttcatggagcatgtactacaatggatgtaagtttgccagaagcaagatcccaaggaagtttaagctgcttggggatgacccaaaagaggtttgtttacttcctgatgtataatcgctttatttttcatagagaattcattagcttagatgaagtgaacaatatgacatatcttggtaagctcttattaatcaaagtttttcccaaactgtagatacacactattttttaagttggcataataatcatattatgccaaaataatagataaaatttgagcaacaaaaacttcctctttggtcttttatgttaattccaaagttttaaaggggtgtcacttcattgttaaaactaaatgagaattggtgatgtttttcatattttgactctgaattatggaagttacataagtactacattcagaaaagaccatttttagtcacatttatgtgcaatgagattcaaataatttaaagtcactgtaatgaatgcatttaataaagtcactgtaatgaatgcatttaagtaactaaaacatttagattttaatataactctgtaatggaaataaatggacactaatttctcactgaagtcattggtttttgtcttgtctgtagaatacgtatttcttataatttgcaaattgataaatttaacaacttttgggtggcatgtagtctagagtatagatacttcttgacttatgaggagactacattcctataaatccgttrtaaaatgaaaatccatttaatacccccaataaacccatcctaaagtaaaaaaaaaacgaagccattataggtcagggactgtctccgtactaattgaatgatgagaaaacctcagtatatttagcatttagctatgaccacattttcagtcattctatacacttacaattatcttttgaatttcgaatacaattaaaatatttccatactatagatattataacattgatgagtccctttaaatgaagaatttgttaaccttattaagctttcacttactattatagtcacagttaataaagcaagtgcaaaaactcctgaaatcacagtataagttttttaaaggatgttttcaataattaaagtttacttaaatgtgcgagacatcatttcataagacaagaatatgaatattaataacttaatgaaaagtactgattttgcttgctgtcattttaattttctacagataactttttttttaaccactgttttatcaagtgataaatgtttatcactttcacgaggtttcatgtaaaccaaatccagaggataccaagtaacttattgcctctgttgggtaggagagctctgttcagaaacctcctcaccttctaaaatttacatctctgccaggtggttatgtctcacaactttttttttttagagaaatatcaatctgaaatgaagacttctaagtataaatggagcagctaaatatgatcacctaccattttttaacagtatattacttggaaaatctgttcttcatgagcagggcaggtgggggtgtaactgagcatttcccctttcaagtaaattctgcaaaggttttcatgtatcctgcattctagttctgaagcattttatccatatttgaagtgtccagtaaattttagttgctctatggagagatcattccaaattatttaaatactatctttataaacataaaatgtaaagattagaaatagacaaattaagctaaagaagttcttttaatagttcatcttccttggtagctaaaaaatgtgacctctttaagaccatacggcttaattcccctaaccctactcctggcacaggcttgtgtgtataaaatgcaaaatatctgcatgcagttagaaaatcaatcttatgaaaaaaacaaatagctagatatttactagcacatatgaaattaaatgatagtcatgttttaaagatgctttatttagtaataaaggcaccatatattgtgtttgggattcaaaatgtaaggggaataatctaactgatagtctcttttacatagagaaaatggacttagaatttaatatgtagaattattcactttatacaggaagagaaactggagtctcatttgcaaaacctgtccactcttatggcaccaacatataagaaacttgcacctgatgcatataataatcaggtaagtttaaataatcattggcagcaattgtaacaacttacttgttactaatgacctatgtccaaaaatatttttgaaacaatgatttttaaatattattctaacttttcctcttaattgttgaaaccactgcagtgttcagtttcgagtatataaaaattataccatacaaaagtacattttttttgtcttttagctgtaaagacatgcgcttctaaaagtcacaggctgttctatctactaatcttgttctcatatgaataattttgtttctgtaaacagactatggagattacatcaaaattatgtggcccaagctataggttctaactacctatttttactgcaagtctataagtataaatgagtattcataagaatttatagacttacaaatattcacataaagctatgcatatactaacattgtaagtatatatatttcggtccagatgtgtcagattttgcygatcttccttttttgtttgaccttgacttcatacaccaagcaaaaacattttttttttctattttacatgtgtattctaaactatagctagttaagacaggtagatgatttggtcagaaatctctcatcatgaaggcaaaaaactaaaatcttcactgtttcagtaacatcaacaacaaaagcattaagtgaaagtctattacaaactaaacactgtgtttagtcactgggaacataaaggtgagcagtgccatctctgtctgtctttamgaattccgtctttgctgggtacggtggctcacacctttaatcccaacactttgggaggccaaggcaggtggatcacctgaggtcaggagttctagaccagcctgatcaacatggagaaaccctgtctctactaaaaatacaaaattagctgggtgtggtggcaggcacctgtaatcccagctactcggaaggctaaggcaggagaatagcttgaacctgggaggtggaggttgcagtgagccgaagtcaaaccattgcactccagcctakgcaacaagagcgaaactccatctcaaaaaaaaaaaaaaattcatctttaactgggtgcggtagtttatgcctgtaatcccagctacccaggagaccaggagtctgaggctgcggtgagccatgattgcatcactgtgctccatcctgggtgacaaagatgacccagattctaaaaaaaaagcaaaaaacaaaagaattccttctttagtggagayagagacatataaaataaatagcaattttagaattacacagttccagctggaatagaagaatgtgcacatttctaaaaaaatttaaaaacaaaacccaaaagtagactagatgtcacaagcagccttagacgctaaataaagatctttgaactttattctgtaggtaaccattgggctgtttcaagtgtgtgttggggatggaagggtaaagtgatgtaattcgtattttgaaaaatttacttaaaagccaagtaagggaaatataacttaaatctatgtaagattagagagagaagaaagctattgcaatcattgggcaagagattttaaggacctaaagaaatggcaggaattaagtatgtacactmactaaggtggagcttagagaacttggtgactagatgtatggatgagaaaagaatttggagatacaacaaatttccagtttggacaggtagttctattaactagtatcagaaattggtaagaaatagtaagttttgggatggggagaagatatcaaaattttggacatgctaggcttctaggttaattagatggagaatcaggagaaaaattcaggctagcactgtagatttgagagtcagaatgctggcaggacttaaagttgaatacataggaatgaaaggaggttttcaaagtagagattataaagaggacaaagggctgatgatgggattctggagccatcaatcattttaggcatgagtggaggaagagaagccaatgaagtaagaactgggggagggagtagaagaaatgtagtaggaaaagtgaaagagggagatggatggatggaggaaagctggaatgatgagaagacacccagagcagagtatacaggagcaataggtatggggctctgggatgggtgctctgtcatttacttgataatattaaagactctcgtgggattagattagtttacacagcagacatggacaagggactaatcctaaaatgatttagctactcttcttttccactgtggactttaacagtcccaaacatttttttttttttttsgttcgaacaatagaggcaaattaaacgatggtctatttgtaagttattttatgtcaaattatgtttttagaaatgtgtatgaatatctatgaaaagtttttaaacactattaatagttggattaatactgttattttgtttasctagtatcacaragtataaggagtgctttgatactgtygtaaaagtttaattctcagcaagaacttctgaaataaatcaagctataaaaataaataaatgaatgagtctatgttgctagatttaaagttgggtcattttctattaaatgaatttttaataggtgctgttaatcaaatggctttacttgaggcagaataacaaagcattgatgttctttttgctcccttgattcttattatggacygtctcatacttgaaactattttatacatttcctaaaacttaagtacccaaaatatgaagccatcaaatatgttcaagttttaatatttatatatgaaaatgtgttgatgtaatgtctagataaattaagtcaattaatagttgtaaatggatgagatgcttctgaatggataaaatatttttatattgcatggtaggtactattggtaatattcatccatgtatgttaatatgctttagagatcaaaataatagccatgtgatgtttccacacagtacacgggaagaccatttgatgttatagatgctgtcataaaacctactatttgatctttacctcctttccccaactgagtgtcgtatctctatttctcacatctgaatattcttccttgctttattccttgatttcatgaagtcttattgctaaagtttagttggctctccacagcatctcttctgtcagtcccatggaattagagcttcagttttctcaacttaaatgtcctttcttcgtgtctatccagtagacatatatttggctctgtcttttctatgcctgccttacaatttaacagtagacctgaaatagcaggtgtcaatctcaaaatcgtgtgctatttatcatacatgaagatgacattttagacaaatgcttctaagagagctttctatgaagatggaaatattctctatttatgctgttcagtgtaataggcactagccacatgtggttattatttaacagttgatacgtggctagtgtaattgagtttaaattaatgtaaaaattaacacaaacagccacatgtggataatggttaccatagtgaacagcacaaccttagaccatgagaaagttatgcatttagaattgtcttccagacatttagatggatttccagtaattcattcacaaaatcctgcatggtattttttaggagatggcataagtgtaatttctagctgattgtatatctgtttttgttcaagaaacagaataaagctaactagaccacagcatgaactgaacggccacaaagcacacatctatgttaaagagtagttggtaccttcattttcctttggccaaagttttatgaggttagatagacaaatacatatatgaatccaacagtaaataatatgaagccaccacaaacttttatcctaatgcaagttcatcttctagccatgatggagtaaacagagactacatatgccgttacacatttaagaaaaaactgacaaaatatatgaaacaatggtttttagacatagaataagaaattcaagagacagtggcaccagagagaaaggaagtaaaaaggtgaacctataaataccccagtttacttcctgaagagagtattaggctccagtgtagccagtaggaacccaaacacacccagccttatctctgtattaaggagacaaagttcaaaatttggagaggccaaggtgacgagagttcactattcagaatatcagagaggagagagtgttattgagaaaagctccagagacctgcagagggttctgatccagtcttcagctgagtattaaacagcacatgcatgtgaaaaaactgccaaggctaggtagggaaagaaccatcagaagaagcaggcagaataatcccttgatctcacacaggacctggaatagttcttgatcataccagccagacggagaagacttcataatactattcataattgtattgccttggtagtagaagtaaatttggcagttctgacctcatctaaaaatgcttaaaatgaaaacatagaagggccaaactgattctaagtaatttaactgcatcacagtacaaaaattaaaaaaaaaatctaccaacaaggtaaaatttatagtctagcattccatcagaaaatacaaggcatacaaagaaaaaagaaaatataacctttactggggaacaggcagaaatcaatcaataaaaatagtcccagaactgacatatgtgatacaatatgtaaataagttcattaaaatggctatcatatttcatatgttaaaatgccagaggaaagcatgagagtgataaggaaagatcagaagatattaaaataccctacaatgaccttctagaagtgaaaaatatatatctagattaaaaatacactaggcggaattaacagattaaggaacttgaagacatagtaatagaaatttttcagtataaagaaaaaactgaaaaaaatgaatatataaaagacctattagccaatattgttacactaatatatgtgtaattggagtaccagaaggaggtgggagacagaaaaatatttaaagaaacaatggccaaatttttttcagatttgttcaaaactgtgaacccacagatctcagcagctcagcaaaccccagattaaaaaacaaagacataaaaaaagactatcaaaaatttataatcaacttgcttacaatctgtgataaagagaaactcagaaaggcaaatggagaaaaaaggacatattacactaggtgggaaaaaataagacaggagacttcattcagaaaaaggcaagagagaagatgtaagagaaacatctttaacatactaaaagaaaaaagactctccacccagaaatatataaccaatgaaaacaactctcaaaaaagacagcaaaataaagaatattttttcagacatacatacaaaagctgaaagaattcaccaccaacaaactagcactttaaaaatgttaaacgaaatccttcaggaagaaagaacatgataccagacagaaatccagatcaacataatgaaatgaacagtatcaaaaatagtaaacatggttaaaagacttttaaaaaaatgataacttgctatcttaaaaatatattaacaatgtattatgaggtttataacacgtagaagtagcacagaggctgaggaattgaaagtatattattgtaaagtacttatacgatatgtggactgggtatattacttggctgtaaactgtgagacgttagagtacactgtgtaccttaaaccactaaaaaaaaaaaaaaagtatatagctaatcagccagtaaagacagaaaaatgaaatcaatccaaaaatgtttttaaaaatatataggaccaaaaaaagataaatataaaaataaaacaaatagcaagatggtttatttaaacccaactgtatcaacaaccacattaaatgtaaatggttttaacacccctaattataaggcagagcttgtgatattgaaaaaaaagcaaaaaccaagaaaaccactttaaatataaagatacaaataaattaaaaagatatttttaacataaaaaatgatgttgaaaagacataacaggaaaaaatatgattattgcagtaggtacagaaaaaccatttgataatattcaacattcataaaaggaaactttctcaacctattaaatacataaatggaaagccaaaagctaatgctatacttagtggtgaaagactaatacttgacccctaagataaggaacaagacaacaatgtccatttttaaccaactgcttctattcaacatcaaactgtaaattttagaaagtgcagtaaggcaataaataaagcagtcaagattgggtaggaaaaaataaaactgtacttatttgcagatgacatgtttgtctacataagaagtctcaaaaaatctaccagaaaatgaaattaatatatgaatttagcaaagttgtgaaatacaaaattcaagtgtatttttatatactagcaataaataaatcaaaataaaccattaaaatagcatcaaaatataaaattcttagacatacatttgacaaaaatgtataagattatatactggaaactaaaacattgctgagataaattatagaaaacttcagtaactggagagatacactatgttaatggatcaaaagactaaatattattaagatgtcakttctccccaaactaatcaatatgttcaatacatgatgtttcaaaaccccagcaggttttttgaaagaattggacaagatggctgtaaaatatatatacttggaaatgcaaaggacttggaatagtcaaataatattttaaaataagggcagaatttgagactatatattgcatggttttcagatttactgaaatctataattgctactgtctgtcaagacagtttgatattgcccaggcgcagtggctcacgcctgtaattccagcactttcggaggccgaggtgggtggatcacttgaggccaggagttttgagaccagcctggccaacatggcaaaactctatctctaataaaaatacaaaaaattactggggcatggtggcgcgtgcttatagtcccagctgcttgggaggttgaggcctgagaatcgcttgaatccaggaggcagaggttgcagtgagcccagatcgtgccactgcactccagcctgggtgacagagtgggactctgtctcaataaataaataaaatttttaaaaagtttgatattgacatacctacatacacaccattatacacaagtggatcagaatagagaatccttaagtagayccaacatatataatatggtcaattgatttttaacaaagatgattcaattgggaagggataaccattttatccagtagtatctgaacagttggaaagccataagggaaaaaaggtaatcttgacccttaatttcacaccatttataaaaattaactccaaataaatccatttatatgaaattctagaaaatgaaaatctgtagtgatagattagtagttgtctgagaacaaagcaggaagcatgaattatacaggggcatgaggaaatttttaagagtaatgaatatgtactttattttggttgtgacaaatatatatcaaaactcaaatagcatactttatggcctcaataacactataaaataaaaattttaccatgtcaagatatttgctctattttgtgtcattccattttgtttctggatatatatttaagttcaaaacatttttttaaagttctaaatggtctaaatactagtgagttttcggtgtaagagtaaaactaactactttcgcattcacacacacttttatttttcagattgaatatgaacacagagcaccagagtgccgtctgggtctgaaggaaggccgtccattctcaggggtcactgcatgtttggacttctgtgctcaygcccacagagacttgcacaacatgcagaatggcagcacattggtaagttgrgctgaggacagcttagcagctgttgagtctgttctcacactgctaataaagacatatgcaagactgggtaatttataaaggaaagagatttaattgactcacagttccacatggctgtggaggcctcacaatcatagctgaaggcaaatgaggagcaaagtcacatcttacatggcggcaggcaagagaacatgtgcaggggaactcccctttataaaatcatcagatctcatgagayttactctcctgagaacagcatgggaaagatctgcccccatgattcaattacctcccactgggtccttcccaaaacacatgggaattttgggagctacaattcaagatgagatttaggtagggacacagccagaccatatcagcagcatctcatgttgaggagcagaacactggaatttagtagcattcggttagagtaatatgttgtctgcaggtttcactggacagcaatattttcatgaatgaattcctgttgcaaagtgacctgctttggcataactagcactctcatgataggttggcacattagtttcctgtcaattgtgttgacaagcacatgagaatcatggaaatccttggtgttaatctaaaccagtgactatgcattgccagttacagttaacttccaggaaaatctcaaaattcagtgccagttacctggtagattgtaatcagttaagcaaaaagccaaatacaagccattcaccttacagagagagaagcatattcaccttacagagagagaagcataaatgagaaacacatcatcattgtcacagtaactgtggtaacctattgtaaaagattcacagtgcaaaagagcctgactacatattacagtgggtaaaatggatcggtcttgtaattggaggcagtggtgaggggaaaatagatacatgttatatatawatatatatatatatatgttctataccaacaaagggttcagggtataattttgcatgtaaaggggtgacccagagtagagataaagaacaaaatattctgttgaaaaaactatgaatcaatcaacctaatgaattatcaacatggatgtaggtgtagttgaagaagatggtcagtgagaatatggaaacagatatcaggaattaaagtcatattctagggcagaaaagcattcatggaggtattagatgatagctgaagtaatttgaagaagctggtgtgaagtttttgttgagaagcagagaagatattaatttaatgttctagatcagagattggaaaactcttctctataaagggcaagatggtaaatattttagggactgcaggccacataggatttctgtcacattgtttggtggggtttttttgtttattttgttttttaaaaactccttgaaaatgtaaaaaccattcttagtttactggccatacaaacacaagctgtgaggcacattagccgtaggttctggtttcctaacttctgatccagaagaacaaacacaaggcctaccaaccaccccaacatctaaaatcatcactaatcatgtactcagcamctgctcattattaggaggctatgctagtttctgaaaagcagaagtagtaaatgataactggggctatagtgcatcctaatataaccatgtttcattccaggaaggygacagagagtaagatgatgagaaggatgtttagaatcaagaagaatttgcctctgatagagcatgggttctgtgaagtaaaatggaaaggagcactagataagaactgaatagggttaaatatgtatgggaaaagtaacaaggtgctcagagacatgaatttgaagacttctgtgcagaaagtgacaggctcattaataccatctcatgttraagttatttctaaagtcagtccattgtgatcacatttctctcaagaatatcttctaattttattttagatcacattagatcacattgtctccattgatcaaaaacactaaatactaaaaagttagtatttaaaaaccacaaataatcttttaccaaagctagtgtaattgtagtaactaaagcaaaaagtaccatttaattatcaaagcaacagaggtagctttcctccctccaccccttacccttttcagagtacccacttatatggtcatatttcagaaaagaaatgaagaaaagagaaagttaggtttgacagagtacaaaggaggagagacaagagagtgaaaatagtattaagttgcatattacctgtatcagccaaatstttaccttttcattttttatatttttacttcagttatcttatggaaatttcttaaacagagagagttaggtgtcaggtatgtgaaaagacatgaaatttgtgttcagaagtatgagatgaggcaaatgtgatactaccaaaaacagaggaagtcatttcgtagaaaaaactttyagcctgtttttgaagaggcttcacatctagcacatctatttttgaagtgtgaaaagcaagagagtgcttcattttgggggagtgttgcttcttcccatagacagaaacatatgtgaagaacaagggtcaccacagctaactgttcctgatagactcagagaaagggtgggtgggcaatgtcaatttgtcttatctccctgtaccattttgttgctattttcattaataacaggtaggatggttttatggtaatrtatatgtcactgatctggatcaactaggccaccaacacaaatctgaatactgagaggagaaagatacacacacacacacacgttttctttgggacctgtagttgaggctgtaatgtcttacttccctaccaggtatgcactctcactagagaagacaatcgagaatttggaggaaaacctgaggatgagcagcttcacgttctgcctttatacaaagtctctgacgtggatgagtttgggagtgtggaagctcaggaggagaaaaaacggagtggtgccattcaggtactgagttcttttcggcgaaaagtcaggatgttagcagagccagtcaagacttgccgacaaaggaaactagaagccaagaaagctgcagctgaaaagctttcctccctggagaacagctcaaataaaaatgaaaaggaaaagtcagccccatcacgtacaaaacaaactgaaaacgcaagccaggctaaacagttggcaggtaaatttaatgtaaagcatttgtagataaatgtgttgtgtggtatattaaaaatgaaaattattttggttttgcccccatcaacttgtaagttctggggtacacatgcaggatgtgcaggtttgttatacaggtaaacatgtgccatggtgatttgctgcacagatcaacccattacctaggtattaagcccagcatcttcctgatgcacccctaccaataggcgccagtgtgtgttgtccccactcccccaccatgtgtccatgtgctcttattgtaaaatgaacattgttaattttggaaagttatatcaatcatggtcttagttctgtgccagagtcttctctaaagtagcaagggccaggctttgttctcagagatggtaatgagatattgcaccatcaacatggaaaacatggaaaagtctggattttattctataataaacagcaactttttttaacaggtaagtgatacgatgaaattcattgtaatttggcagtaggccaaattagtagaggagctaatagtttggagataaacacagtaaaccagaactgaggtaacaagaccttgaattttgttggttagtagcaaagatatagcaaaatgatgcaaatgagctcttccaaaatgggaaaaagaaaatacattggtgacaaaacactggaatgaaagagaagaaaagtttaaagatgaccccaaagttttaaacctaaacttaacctactgttttaggtttctaaaacagtactatttattgaaataagtaagtttgaaaatatgattgagagagagagaggggagaatgaaacatttttccttagacatgttgagtctgtggtttaggaggggttctacatgtagattatgctacaaaacttttacccatcaaaatagattacagctgtagtaataacaatagaacattattcatgaatactaagttattgtctttccatagcctcctgctttatgtctgcagtttgtaaaaagaaaaaaaatccaaaatttgggatggtattggcctggccattaacaaaagcaaaccagtttgcttaaaactagccatctttgctgcttcatgaagtcaaatttctctactgattcatttccaagctcagaggaactaagttaaataatttagaatatgctaaagatgcttgataagtgtttattgactggttgacttaacactaagtaaatactgttcacttaggttagctgtgaaatataattagatagaaccttgtctctgctcccttttaactggcttctgcaggtaataatcccttctgttctcagaactgccattgcagtttcatctatttgttcttaactcatatgactttttaaagtgaggtcaaaacagaagtatgacttttaaaagtttcatttacaaagctgaaagtttctttaaagtgttatctacaactgtgttaacttcctttctggaaagcctgctyataaagtagcacttgttgattatataagatrctttttgtgtttaaatacgtgtcattcttttttttcacaacattcccgaatcttacataataaatcttattttaattatttagcaaattccattgcatgccaggcaatgaagaagtaagtaaaataaaacattttccttcccatttaggaatttacttaccagtgggggtgaagagagggctaaaaacataactataatacattgtgagtattgctttatcagatctatctttgcagttgagtattacaaaagcactagaagatgaggtcaaagcggtcccttgaggaagggatgactacaccaaggaaggatagggagagagggaggaaaagggaggcacttcaagcagaggcatgttcagaagttccaaagaacattttgctctcaatggaatggctttggatgtttattacattttttttttcactaagttttgtatttctaatgccttagacaaaaaattgtgctggacaatgatcagaaccctgactttgctcttatctttgcttaatgggtgtygtatatcactagtggagtttcttacctacatttaagtaycctcactagccttcataaaataatcatcaacatcaaagatacctgtttctgttctctcttaccctgtccacagaacttttgcgactttcaggaccagtcatgcagcagtcccagcagccccagcctctacagaagcagccaccacagccccagcagcagcagagaccccagcagcagcagccacatcacccycagacagagtctgtcaactcttattctgcttctggatccaccaatccatacatgagacggcccaatccagttagtccttatccaaactcttcacacacttcagatatctatggaagcaccagccctatgaacttctattccacctcatctcaagctgcaggttcatatttgaattcttctaatcccatgaacccttaccctgggcttttgaatcagaatacccaatatccatcatatcaatgcaatggaaacctatcagtggacaactgctccccatatctgggttcctattctccccagtctcagccgatggatctgtataggtatccaagccaagaccctctgtctaagctcagtctaccacccatccatacactttaccagccaaggtttggaaatagccagagttttacatctaaatacttaggttatggaaaccaaaatatrcagggagatggtttcagcagttgtaccattagaccaaatgtacatcatgtagggaaatkgcctccttatcccactcatgagatggatggccacttcatgggagccacctctagattaccacccaatctgagcaatccaaacatggactataaaaatggtgaacatcattcaccttctcacrtaatccataactacagtgcagctccgggcatgttcaacagctctcttcrtgccctgcatctccaaaacaaggagaatgacatgctttcccacacagctaatgggttatcaaagatgcttccagctcttaaccatgatagaactgcttgtgtccaaggaggcttacacaaattaagtgatgctaatggtcaggaaaagcagccattggcactagtccagggtgtggcttctggtgcagaggacaacgatgaggtctggtcagacagcgagcagagctttctggatcctgacattgggggagtggccgtggctccaactcatgggtcaattctcattgagtgtgcaaagcgtgagctgcatgccacaacccctttaaagaatcccaataggaatcaccccaccaggatctccctcgtcttttaccagcataagagcatgaatgagccaaaacatggcttggctctttgggaagccaaaatggctgaaaaagcccgtgagaaagaggaagagtgtgaaaagtatggcccagactatgtgcctcagaaatcccatggcaaaaaagtgaaacgggagcctgctgagccacatgaaacttcagagcccacttacctgcgtttcatcaagtctcttgccgaaaggaccatgtccgtgaccacagactccacagtaactacatctccatatgccttcactcgggtcacagggccttacaacagatatatatgatatcacccccttttgttggttacctcacttgaaaagaccacaaccaacctgtcagtagtatagttctcatgacgtgggcagtggggaaaggtcacagtattcatgacaaatgtggtgggaaaaacctcagctcaccagcaacaaaagaggttatcttaccatagcacttaattttcactggctcccaagtggtcacagatggcatctaggaaaagaccaaagcattctatgcaaaaagaaggtggggaagaaagtgttccgcaatttacatttttaaacactggttctattattggacgagatgatatgtaaatgtgatcccccccccccgcttacaactctacacatctgtgaccacttttaataatatcaagtttgcatagtcatggaacacaaatcaaacaagtactgtagtattacagtgacaggaatcttaaaataccatctggtgctgaatatatgatgtactgaaatactggaattatggctttttgaaatgcagtttttactgtaatcttaacttttatttatcaaaatagctacaggaaacatgaatagcaggaaaacactgaatttgtttggatgttctaagaaatggtgctaagaaaatggtgtctttaatagctaaaaatttaatgcctttatatcatcaagatgctatcagtgtactccagtgcccttgaataataggggtaccttttcattcaagtttttatcataattacctattcttacacaagcttagtttttaaaatgtggacattttaaaggcctctggattttgctcatccagtgaagtccttgtaggacaataaacgtatatatgtacatatatacacaaacatgtatatgtgcacacacatgtatatgtataaatattttaaatggtgttttagaagcactttgtctacctaagctttgacaacttgaacaatgctaaggtactgagatgtttaaaaaacaagtttactttcattttagaatgcaaagttgatttttttaaggaaacaaagaaagcttttaaaatatttttgcttttagccatgcatctgctgatgagcaattgtgtccatttttaacacagccagttaaatccaccatggggcttactggattcaagggaatacgttagtccacaaaacatgttttctggtgctcatctcacatgctatactgtaaaacagttttatacaaaattgtatgacaagttcattgctcaaaaatgtacagttttaagaattttctattaactgcaggtaataattagctgcatgctgcagactcaacaaagctagttcactgaagcctatgctattttatggatcataggctcttcagagaactgaatggcagtctgcctttgtgttgataattatgtacattgtgacgttgtcatttcttagcttaagtgtcctctttaacaagaggattgagcagactgatgcctgcataagatgaataaacagggttagttccatgtgaatctgtcagttaaaaagaaacaaaaacaggcagctggtttgctgtggtggttttaaatcattaatttgtataaagaagtgaaagagttgtatagtaaattaaattgtaaacaaaacttttttaatgcaatgctttagtattttagtactgtaaaaaaattaaatatatacatatatatatatatatatatatatatatatatgagtttgaagcagaattcacatcatgatggtgctactcagcctgctacaaatatatcataatgtgagctaagaattcattaaatgtttgagtgatgttcctacttgtcatatacctcaacactagtttggcaataggatattgawctgagagtgaaagcattgtgtaccatcatttttttccaagtccttttttttattgttaaaaaaaaaagcataccttttttcaatacttgatttcttagcaagtataacttgaacttcaacctttttgttctaaaaattcagggatatttcagctcatgctctccctatgccaacatgtcacctgtgtttatgtaaaattgttgtaggttaataaatatattctttgtcagggatttaacccttttattttgaatcccttctattttacttgtacatgtgctgatgtaactaaaactaattttgtaaatctgttggctctttttattgtaaagaaaagcattttaaaagtttgaggaatcttttgactgtttcaagcaggaaaaaaaaattacatgaaaatagaatgcactgagttgataaagggaaaaattgtaaggcaggagtttggcaagtggctgttggccagagacttacttgtaactctctaaatgaagtttttttgatcctgtaatcactgaaggtacatactccatgtggacttcccttaaacaggcaaacacctacaggtatggtgtgcaacagattgtacaattacattttggcctaaatacatttttgcttactagtatttaaaataaattcttaatcagaggaggcctttgggttttattggtcaaatctttgtaagctggcttttgtctttttaaaaaatttcttgaatttgtggttgtgtccaatttgcaaacatttccaaaaatgtttgctttgcttacaaaccacatgattttaatgttttttgtataccataatatctagccccaaacatttgattactacatgtgcattggtgattttgatcatccattcttaatatttgatttctgtgtcacctactgtcatttgttaaactgctggccaacaagaacaggaagtatagtttggggggttggggagagtttacataaggaagagaagaaattgagtggcatattgtaaatatcagatctataattgtaaatataaaacctgcctcagttagaatgaatggaaagcagatctacaatttgctaatataggaatatcaggttgactatatagccatacttgaaaatgcttctgagtggtgtcaactttacttgaatgaatttttcatcttgattgacgcacagtgatgtacagttcacttctgaagctagtggttaacttgtgtaggaaacttttgcagtttgacactaagataacttctgtgtgcatttttctatgcttttttaaaaactagtttcatttcattttcatgagatgtttggtttataagatctgaggatggttataaatactgtaagtattgtaatgttatgaatgcaggttatttgaaagctgtttattattatatcattcctgataatgctatgtgagtgtttttaataaaatttatatttatttaatgcactctaagtgttgtcttcctgaagtttttttagtgcttgaatgactgccacctcaatgaagaaaagggaataaaaaataatttttaaagacacttttaagatagatagttagtcttatgttaaactatatctaagataatacccaaataattaaggccgaagtatttctctggttaaatggtgtagatattcactcacttttccttccaactaacttgttagtgtattcactttgcatgtgtagacagtgtaaatcagatagagagtaaagcacctctaatcttagattgccccctccagtgttttgtgaagggtttcagtgatatagcaggtgcactaaggttgaattcatattgcttagaactaaggccaactctgttttcagactctcaccttccacttcttgcctactcttcttaagggaagatacttcttcctgtacatcagaaaggcagggtggtaggctggaggaatggggagaggaggcctggaaggtatcagacaaatatacttgtcctcatctagtcccacatggcttcaaggagcttgaggctaaatcatcctcatctctacccattctctgccatgtgaatcatcccatacataatatcagtgcactccagctgaaacacttcctagaaccacaagatgctaaacaatagttgtgggaatcttccagccctccattccttcccaaattggcagagaaatcattttcatcatgcatgaagtaaaggaattccctttctcacatttctctctgttcagcctgggccaaatctgattcaaatagtgcaacccaggaaatgactaccatttagtaacctctgagcttattgactgggagattcctccaggactctgcaagccaggatattaagagaagccacaacatcactgttaaaacacaatgatctaatgacttggcttttgttttaatttcaaccctctgagcacattgtcaaccctcatttcaccatccatcatctggctgaaccttgggaacctcccactccacatttgcaagtctccactgcccagggcagggagaattttagactccacaagctcaaaagcctttcctgctagagccccattctgctaggatctctactagtggaggctggtgatgctagcacaccataaatgaacgtgtgggaaggcctgctgcttctgagcctgcaggtggacttgaacaggggaaacagctggaaatgacagatgagccagcattcacaaagctttattggccccttgcctctcctggaaagacataacaaggccaaaccttttcttgtaggcacacacagctgccctgtcacacagtaccacccgtttcttcctcactttttttcagttggtttatcataaaaatccttccactatgggtaattctagcttatctttgagtcctgcctgattccactgcccagcactcatcggctgtgtaagagccagacttagcgagaaaagtcatttttcaacaaggcacctaatccgtagagtgtggggaattttagattgattttgttggtttaaaggccatctggaggcgagtatcaaaaaaagaaaaaagggtgtggggaagcatcttttcttcccttaattgatttgagggaagtgcttgtttcatgaagacacttgtttattaacttcaatcacccaacttatccgtaaggcgtcagggactttatcttccccacccccattgcccccctcccccaatacactcacagttgttgaaagaatgaaaaagtgttcacaaaagatgcttagaattaactcatttatgttattttggttttactaggagaattgtttcaaagaacgaagatgcttttgttcccatatattagaggctacctgcctaaattctctctaaccaggtagtttctcacaaacttccttggttttctcatccaacattcactctttaaaagagccacactttccctcacatatatactcaacaaatatagttttttggagggatttctttttatgctgtttcaatttggcattttactccctaatgaggttttttttggcacaaatgtatgaggtatgtgagaaagtttgttacatatatatatatacacacacatatatatactatatatatactatatatacatatataatatatatgtatacatatatattatatgcatagtgatgaagtcaaggtatttagggtatccatcaccaagtacaacatttttcttaagtatagtcaccctactctattaactttttttcggagatggagtcaagactccactctgtcgcccaagctggagtacagtggcacaatctcaggtcactgcaacctccacctcctgggttcaagtgattctcccacctcagcctcccaagtagctgggactacaggtgcacgccaccacgcctggctaattttttgtatttttagtagagtcagggtttcacctagccaggctggtctcaaactcctgacttcaggtgatccgcccacctcagcctcccaaagtgctgggattataggtttgcaccactgcacatggccaaatattgactttattctatcttactatatatttgtatactttaacccagttcccttcattctctcctctccccacagtcacccttcccagtctctgttatctgtctttccactctctacctccgtgtgatcaaattttttagctcccacagataacccacatataacatatgatatttgtcttatgcctggcttatttcacttaaaataatgacccctcagtgtcatctacgttgctgcaagtgacaagatttcgttcttttctgtggttgctccattatgtgtagaaaccacattttctttatctattcatccactgatggacatataggttatcccatgtctttactgttgtgaatagtgctgccataaatatgcagtgcagagatccctttgatgtactgacatctttccctttaggtcgtagtaggattgctggattgaatgatagttctattcttagttttttaagaaatttctatactgtcttctatagtggctgtaaaatttacattcccacacacaatgtaaaaagagttcccttggccgggcgcggtggctcatgcctgtaatcccagcactttgggaggccgaggtgggcggatcacgaggtcaggagatcgagaccatcctggctcacacagtgaaaccctgtctatattaaaaatacaaaaaaaaattagccaggcgtggtagcgggcccctgtagtcccagttactcgggaggctgaggcaggagaatggcatgaactccggaggcagagattgcagtgagccgagatcgagccactgcactccagcctgggcgagagcgagactccatctcaaaaaaaaaaaaaaaaaaaaaaaaaaagagttcccttttttctgcatccttgccaacatgtgtttattttgttttgttttgttttactaatagctattatgaatggcaataagatgatatctcattgtggatatgatttacatttctctgattattactgaaatacattactgattattactgatcataagcctgtttgccatacaaatggcaaataatcagtaataatctatatcagtatagattgtatcattctgattattactgattataaacctgtttgccatctgtacatcttcttttgagaaatgtctattcacttactttgcctactttttaaaaagatttgtgcttttttcctgttccttctacattctgatattagtcccctgtcagatgaacagtttgcaaatattttctctcatttaaaacaagttgttctctcactctgttcattgtttcctttgctatgcagcagctttttagtttaatatagtctcatttggctatttttgtctttgttggctatgcttttgaagtcttagtcataaattctttgctttgaccaatatccaggaatgttttctctaggttttctttctattgttttcacagttttaggttttacatttacatctttaatccatcttgagttgatttttgtatatggtgagagatcgggtctagtttcattcttctgcatgtggctgtacaatttttccagcaccatttattgaatagggtgtcctttttctattgtaagttcttgtcagctttgtcaaaaaacagttgactataaatatgtggctttattgctggattctctattctggtccactagtctatatatatatatacatatatatatatacacacatatatatatatatatatatatacgtgtatatatatatgtatatatatatatatacgtatatatatatatgtatatatatatacacatatatatatatattttttttaaccagtaccatactgttttggttacttgtaatatattttgaagttaggtaacatggtgcttccagctttgttctttttgctcaggattgctttggctatttaggctctttgggtttcatatatatgttagtatttttctaattctgtaaagaaataaaatggtattttgataggaatcgtgttgaatctatagattgccatggccaatgtggtcattttaatattaatttttccaacccatgagcatggatacttttctatttgtgttgccttcagtttctttcatcaacgttttgttcttttccttgtagagatcttttacctccttggttaaatttattcctagggtttttttttggtgggggagggggagcgcttatctattgtaaatgggatttctttctcagctacatgattagtgaatagaaatgctactgatttttgtatcctaattttgtgtcctgcaactttaattcatttgtccgatctaagagtttttttcatggagtctctaggtttgtctagatataagatcatcccattagcaaagaagaacaatttgacttcctctttgcaaatttggatgccttttctccttcctgattgctcagggaacacttccagtatgaagttgaataaaagggtaaaagtggtcatttttgccttgttccagttcttagtaaaggctttcaacttttgccaattgggtatgatgttagctatgtgtttgtcatatgtggcctttattgtttttaggtgtgttctatgtccagtttgagttttcatcatgaattgttgaattttatcaaatgctttttctgcatctattaagaaaatcatatggtttttatccttcattttttgtcgatataccatgtttattgatttacatatattgagcaatccttgcatccctgggataaatctcacttggttgtggtgtattatcgttttgttctgctgttggatttcatttgctagtattttgttgatgatttttgccatctatattcatcagagatattggccctgttttctttttcctcgtatccttgtctgatttttggcatcagggtgatgctggccttgttgaatgagttagaattctctcacctttaattttttggaatagtttcagaaacattggtagtagtgatttttgtacatttggtagaatttggctaaggatccattcaggagacttgttattactgattcaattttactactcattgttgatctgttcaggttttctatttctttttgattcaatcttaataagatgaatgtttctaagaacttactcatttcatttagattttccagtttgttgtatatagttgtttgtaatagtctccgataaatgtttgtgtttgtatttctgtgttatcagttgtaatgtctcctttttcatctgatcgtatttggatctacgcttcttggttagtctacctggcagtttatcaattttgtttatctttttgaagaagcaactttttgttttgttgatcctttgtacttttctcagtctagacttcatttagttcttctctgatttttattatttcttttcttctgctaattctgggtttgatttgttcttgcttttctagttctttgaggtacactgtgagattgttaatttgtaatc

SEQ ID NO: 97665 - DNA, 123843 bp, Homo sapiens
  misc_feature (1)...(123843): n = A,T,C or G
aagaccctgttctcaagaaaaaaaaaaaattccttgatgagcatgttcaccgtaaaacttaagagcccagctctggcccagcgtcgtggctcacgcctgtaatcccagcactttgggaggccgaggcgggcggatcacgaggtcaggagatcgagaccatcctggctaacacgtgaaaccccatctctactaaaaatacaaaaaattagctgggcatggtggcgggtgcctgtactcctagctactctggaggctgaggtaggagaatggtgtgaacccggcagggggagtttgcagtgagctgagatggtgcccctgcactccagcctgggcgacagagcgaaactccatctcaaaaaaataaaataaaaagcccagctctgctcttactagctgcatgaccattaatgtgcatgtagtatgttttgtctatcatctatcaaaatttattttttccttttttttatttttgagataacggctttctgcagcctcaatctccctaggtttgggcgatcctcccacctcagcctcccaagtagctgggaccacaggcacgtgccaacacacctggctaattttcgtattgtttatagaacagggtcttgctgttgcccaagctggtcttgaactcttgggctcaagtaatctgtctgcctcgacctcccaaagtgctgggaggccattcctattggtgctgatgatagcaccaatgatgctggtgctagatagacagcatctcatgatgctgataaaggctttccagctccccatgcccttgggatggggaccacgctccttgccatggctcacaggaccctcttgcctgcccctgaggaacagattcatctttggctctcacccccttgcattgcagcactatagcctctttcagttccttgaatatgccatgttctctcacatctgggctgttccctttgcctggaacagtattctcttcctgaaacacagtttttttccctgccctgcctccttgcctggctgatctccaactcacctttcaggcatcagcttggaatggtctattcctgtctcttgcctttctttcagcaccatactctttctccctcataccatttagtcattcattcattcattaattcaacaatatttattgagtgcctagtacatgtcaggcaccattctaggcttacctgtcatactgtattgtcactgcctgcttcagtacttttttttttttttttaagacagagtttcactctgctgcccaggcaggagtgcagtggtgtgctcttggctcactgcaacctctgcctctctggttcaagcgattctcttgcctccgcctcctgagtagctgagattacatgcctgcacaaccaaacctggctaatttttgtatttttagtagagagggggtttcaccatgttggccaggctggtctcgaactcctgacctcaagtgatccacccgcccagcctacctaagtgctgggattacaggcttaagccaccacgccccaccaatacttattgatctatatggtatgctagtgtaattcagatgccataaaattcacccttctaagtgtataattcagcagttcttagtatatccacaagtctgtgcaagcatcaccattacccaattcccaaacattttcatcacttcaaaaagaaatccattcaattaccaaaaaatgtgatttaaaaaaacaaggccaggtgtggtggctcatggctgtaatcccagcactttgagaggccaaggcgggtggatcgcttgaggccaggagttcaagaccagcctggccaacatagtgaaacctcatctctacaaaaaagaaaaaaaaaaattagctaggcatggtggcacatacctgtaatcccagctactcaggaggctgaggcgtgagaattgtttgaacccggaggcagaggttgcagtgagctgagatcataccactgcactccagcctgggtgacagagtgagactctgtctctaaataagtaaatgcataaaacagaaagacaccactttgtaaccacacaattaaaaaataataaataacaaataaatacataacagaaagaggctaggtgcagtggctcaagcctgtaatcccagccactctgggaggctgaggcaggtggatcatctgaggtcaggagttcaagaccagcctggccaacatggtgaaaccccgtctctactaaaaatacaaaaattagctggttatgatgccacgtgcctgttatccgagctactagggaggctgaggcaggagaatcacttgaacccatgaggtagaggttgcagtgagccaagttcatgccaatgcactccagcctgggcgacagagcaagacttgtctcaaaaaataattagtggccaggcacagtggctcatgcctgtaatcccagcactttgggaggccaaggcggatgaatcacgaggtcaggaatttgatacaagcctgaccaaacatggtgaaaccccatctctactaaaaatacaaaaattagccgggtgtggtggcgcgcgcctgtaatcccaactactcaggaggctgaggctggagaatcgcttgaacccgggaggcggaggttgcagtgaagattgcaccactgcactccagcctgggtgagaacagatcaagacaccgtcttaaaaaaaaaaaaaatttagcgtggcatggtggcgcatgcctgtaatcccagctacttgggaggctgaggcagaagaatcacttgaacctgggaggtggaggtaggggttgcagtgagccgagatcatgccactgtgccccagcttgggtaacagagcaagactccgtctcaaaaaaaaaaaaaaggaaaaaaagaaaaaatagaaagagacctattattagtcattttccattctcccctccccccaggccatggcaaccactaatcaatctgtctcaatggatttgcctattctggacatttcatataagtgaaatcatacaatacatagtcttttatggctggcttcttttagttaatatgcttttacaagattcatccatgttgtaatatgaatcagtactttattccttttcatggctgaataatatttcattgtatagatacaccacatttggtttacctcttcatcagttgatgagcatttgggttgtttccactttttagctcttttgaataatgctgctatgaacatttacgtacacatttttctgcagacatatgttttgctttctcttggaactctacctaggtaggagcagaattgctgggtcatgtaactccacatttaatctttttgaggaactgtcaggctgttttccaaagcagctgcaccattttacatttccaccagcaaggtacaagggttccaatttctccacctctcatcaatacttactattgcccttctctttgatcatagccattcaagtgggtgggaagtgtttcttctgatgttctatgagaacagggactccatctgtctggttctggttcagtactgtatcccagaacctactacagtgcctggaatttattacatactaaatattgtgttaaatacactaaaaaactgttcagtgaatggataaatcaaaagctgtttggatagttacaatgggtatcatgtatttatctctctaatagggatcttccacggggtctaataccttttttttttttagtatagtactgaaccactcttctgataccatagtctttcttctaggaggaaatgggattaaatttaagctttcttgtttttcctctttaggtatacacatactcatataggcacctacagataatttattagatgttggcacattttgtttcttcctatttttacttctcttgcaaaaattcttacttctacagggctgtttgctcacctccaggtatttcatgcttgcaaataggtttcctcctgtttccaggctggccacaatggaacaatcaatacctgtgacgggctagccttgctctttttggttttcttttaatatttctgaacatcctgttttggtcccccagtttagaagtatctggggtcatttaataggtggaagtcagctaagccagggactgtgtgatactcacagccagcacctagcacttgataaatagttgttcagcagtcacagtggctcatgatgtaatcccagcactttgtgaagccgaagtgggaggactgcttgaggccaggagtaccggcctggacaacatggggaaactcccatctctactatatatgtatgtatatacacatatatatatatcatatgtatattttgagacagtctcgttctgttgcccagtctggagtgcagtgacgcgatctcagcccattgcaacctctgtctcgcgggttcaagccattctcctgcctcagctacccaagtagctgggatcacaggcgtgagctaccacacctggctaatttatttattttttattttcatttttttttagtagaaatgaggtttcaccatgttggtcaggctggttgcaaactcctaacctcaggtgatcccctgccccatctccccccacccccccacccccagcctcccacagtgctggaattacaagcatgagccaccgtgcccggcctgattttgaaatttttaacagacttttactcgggaggctgaggcagaagaatcacttgaacctggaaggcggaggttgtccagcctgggaggagcaaggctccgtctcaaaaaaaaaaaaaaagaaaagaaaaaaaagaaaaagaaaaacagggcgggcgcggtggctcatgcctgtaatcctaacactttgggaggccaaggcaggtggattacctgaggtcaggagttcaagaccagcctggccaatacggtgaaaccccgcctctactaaaaatacaaaaaattagccaggtgcagtgtggcatgtgcctgtaatcccagctactcgggaggctgaggcaggagaatcacttgaatccgggaggcggaggttgcggtgagccgaggttacgccacaccactccagcctgggtgacagggcgagattacgtctcaaaaacaaaaacaaaacaaaacaaaaaaaacagttgttcaataaatgaatgtgaatataggagaaagacggcttgaggtagcaaaggaacactcccttgcaaatgattcaggcttggtcaacaatacacctattgagtacccaccgtgtccttggcccgtggtgagggccgaaacacagcacatggtaaacaaaacagggctccagccttggacagaaggtttctataatcacttctagctgcgttgttctatttccatacccatatctattcactttttatggtacatctattgattctgaaaattacattttagctaaggaatctactcatttgcttaagcccaaaataggaagttatgatctagtgtcagcaaaacgccggattcacaagtgtccccatggcgctgtttacccccaaataactaaaccccgccaaatgttgagattccggacgtgaggggtgcttggatggggaacccccgaaagaatggacatcacgtccaccagagggtgctgtgggggcaaatttgtgccaggaggggagctcgaccggtgaccctcagagccaggtaggcgtaaggagtaaatctccttcttcccggtgtttccttcccaccccctcgaaccattgctgcccctcccccatacttggttccccctgaataatttgccactttcggggacttaagaagtgtttgcttttgaaagacatctggtttctgtggctaacgcccagtggtcaggccgcccaggtcacaggccggccgggggcgggcggtgggtggggactgctggggcgtcagcggcccaggcgccgcagggaccgcgaaagggttaacccggcggggggagggggagggggcgcgggccgcgcctgcgctctgccgccctccattgtctccacggcggcgaggagcgccggcgagcgcagcccgggaccgagcggggcggcgcggctggcggggccggcggcggctgaagcgagagcgcgacgcgacgcgaccgcggcttcccgagctgcgcctggccgcccagcgccgcggcccgcccgaggcctggaggggtccgggccgccgtccatggtcgcggcgtcctgaggcgggggacgcgcccggcgcccccggccctcctccgcctcctcccgcggggcgggcggcctcctccggcgcctccccgcgcccgcccgccgctcgccgccgcctccctccctccttccctgcggctcccccggctttcggagcccgggggcggcctgtggcgcgcggagcccgcgccggactgcgcctctttggaccttgaggggaaacatgcgtttgccttggatcgtttgaaattctgagtttgggatccccgcccgcccgcctgcctcttccgccccgcgggttttttccttttttccttttgctttttttccttttctccctccgggtctcctttttgactccctccccctttatgctcgcccagccctccccctgctgctgagaagtgggggagggtctcggcctccaggttcccgccccaccggggcccgggcgagcatggggggcaagcagagcacggcggcccgctcccggggccccttcccgggggtctccaccgatgacagcgccgtgccgccgccgggaggggcgccccatttcgggcactaccggacgggcggcggggccatggggctgcgcagccgctcggtcagctcggtggcaggcatgggcatggaccccagcacggccgggggggtgccctttggcctctacacccccgcctcccggggcaccggcgactccgagagggcgcccggcggcggagggtctgcgtccgactccacctatgcccatggcaatggttaccaggagacgggcggcggtcaccatagagacgggatgctgtacctgggctcccgagcctcgctggcggatgctctacctctgcacatcgcacccaggtggttcagctcgcatagtggtgagtccgcgggtggtggaggcctcggagggagggcgcgccggggcgccccaagccttcgcgtgcgtgccaaggtttgggaatgtagtgcacgaccgggatctgtctgcattccctttggttcccgatgccaagggatgaatgggatacctaccgtctggaaactaggctttctgcgaggctgcggagcctggcgatttagggactcacggcgtgtgttmacttgtggaagggcagagcgaagcctacctattggagttccatttattggcatcaccctcctcagagaagaggtcgtgtctggctgagagcaagtcagcctgggtacttccattctgccactgcagcactgtgcctgcctcaccggtaacggagagatggagccagttggagcaagcagtgtctcctaaacagagtgtgtgaaaatgaaataaaatcaggggcaagtgatgcctggattagggctctcactcttgctgggagagagaggtgcccagttttgccaccctgctggagatctgtttgaaatgtttaaaatggagcagccggcaggcggctggcatagacaggtgtggctgctgtacggagggcccagycggcgagtctcgcgggggctttgcaggacccgggctgtggtcacccgtactgcatgcagcaggcttggctccgcgactctcgcctccctccatctttttttcttctgctccatgctaagtgcttggtcttcccgtgaatctgcatctttttgtaacagggagcctgtcacggtggggcattattgcctggctgttggcacatgactggggaaaaggaggattcasagaatctggatgaattcattttatgaacttctggtgacaggccagcaaaaggttggagggggatttcccaggctcctagcgggagggcaaaaaaggcctggcaggaggaaaacaggtctgtctrctaggtcaggcatctagaaaattggccaaaagggatgtgggggccgctatttgctaattggcaagttgagtgatgaagttacatcttaagattcttttgggtgagttgggaaaatttagatagtgtaggggaaagattgctcctgcctttagggtactttatggagggtaatatctgttggatcactcttttaactactgtgaaatagggttgacttttggggtatctctttycccccccctgcaaatagcctggggtttgttttcatttggtttggttttttgtcaattctgtaaactttaatttgtgaaatagtgttgggggagaaacgattagtgactaatttagggtaacacttagaagtagcttgtgaattgttaggatgatattttaatctctgacagacctccggatatcattggagcttttctgacctcatggaactctgccctgagtgagaagcaggacatgattgcctttggctctttcaggcatttgatcaaaattaggcattttgaaattaataatttttcctatggaatttagtccagagagttagccatatttttgagatgactagtttggtgtttaaaagaactgtaatgagcatctggttttgaacttaaaagtactgtaagaagtttctctaaaatcacagaattttttgtgttgaaaaacatatgagatatgtagggaggaagaaagggagtgctttttttgctaaaatttcttaagcctcttactaaaaatttatttattatgctactaccaggttccatgctacagttatgagcttgtagttggattccagaatttcactcttaagctgtgaaaccttattttttttcatccgatcatggtgagggtagggagagccactgaactgtggggacaggaaggttggagcatattaatcctttagggaagggtgtcaaaagtgtgtatgggaggctgctattaatattgtaggtaatccattccttactgtgtaggaccatcatgtccttctgcaagacatcgagcatacctactaaatgctgatagcatccagcagttcagtgtgtcaccccaaaatgtccccaagaattcccaaatgccctctggggtgtgggtggtatcactctggttgagaaccactgctttagggatttattcttttattcacataaagtaattggcttttcctgtgcatttcatttgagatgaatcttcgtgtgcagcattggttccatctcacctgaaacagaccatgggatcttccaggacatctgtttcctctgttacacattgctgcaagaagcaaaacttgtttctgctttggagcctttgagtaaggtctaagcagcttttgctcttctgttgcaagattggaagggtaacgattttggtgcacaattaattagatgcctggaagttgatatgatatgtttgcttgtgttttcaaggtgctcttgcaactcttcatgggcacagaaaacagttgtcagtgaaatacatgagggagttcagtgtatacaaggccttctcagagagcgtgggcttaggctgggtctggaggtagaatactgaagggccctggtcccagctactcctctgagcagctgtgaccttgggcaagacatatcccctctcttgagccttatctttgtcgtttttaaaatagttgtggtcaccctcacgagctccagccttgctccgcaaatcccgggagaggaagcgctgtagtcacatttgtcttctctaggttcctgacttccctgtgctgtgacccccacgtataccattccctaatcctagagtgcttttctctccgttcttcacacgaatttctctttctgatcccttagggcttagagaccactcttaaaaattggcccctccggttattctctccagtcactcacctgttaccttaatcattcttttttttgagacagagtttcgctcttgttgcccaggctggagtgcagtggtgcgacctctgctcactgcagtctccgcctcccgggttcaagcaattctcctgcctcagcctcccgagtagctgggattactggcatgcgccaccatgcccaataagcttggggctaattttgttttttgtagagacgggatttctccatgtttatcaggctggtctcaaactcccgacctcaggtgatctgcctgacccggcctcccaaagtgataggattacaggcgtgagccactgcgccctgcaccttaatcattcttaacacactttgtaagtattttatctgtttacttttttctgtgtatggtttgcctaaagtctaagctccgtgagagcaggactgygttccttgatctctgttgtgggtcctgcactgtgcctgccactcacattttttgagtacatgaatttgagtactttatgttcatcatctcacttaatcatcactctractctatggagtaagactgttctctcccacccccattgtgcrggtaaggaaacaggtttggggaggttaaggaactcacacaagatcaggtggttagtaggtggtggagatgggattggaatgcaggttggctggtgccagaacctgggctcttaaccagtaccctcttccgcctcttatctgaaaacatcacaaagccgcatggtgtcctggagattgcgctggcctacgagtcagagtgctaggctcatctcctggttaggcagctgattagctgcatgatttgtgaccttgggcaagcgagtcatttaacctcagtcacaatttattcatctgtaaaatgtagaagacgcctgtcctgcttacctctcagagtcatagtgagggtctcatgagataatgtgcacaaaagtcaaaggacattctaaatggagagtggtggagttcctatgggggcactctcttatagttgtctgccttcaatcgcctcagattttttttttttttcttttgagacagggtcttattctgtcacccaggctggagtgcagtggcgagatcatagctcactgcagtctcagactcctgggctcagttgatcctcccagcttggcttcccaaagtgctgggaccacaggcatgagccaccgtgccaggcctaatggtctcagaatttgatgggtggagagaggtttacagctgtgctagctgtagcccccaaatggaatctggttctgtgtcctaaagtctggcctgcattagtgggctgcttttactcataatgccgctgataagggctgctttatagaagcagagtgactccctttccacgttaaaaagttttgctataactcctgatggctgcctcggtgctattctggaggcctggtcattctctttcggtagttctgtttgtctcagagtatggatttctaaatgtggggtacaaaacatgcaccatccaccatgttgaaagaagttgctgttttctaggttctactataaaagggctggccattgagggcttcacttcaccttcttagtcatatgtgtatatatatgtatgcactttcagaaagtctaaactgttctttattgtcatcaagccatcaactgagactgatacaaggtgattgtgttttgtttttgttatttatttatttttgagacagggtcttgctctgttgcccaggctggagtgccatggtgcaatcatggttcactgtagcctcaaactcttgggctcaagccgtcttcccatctcagcttccagagtagctgggactcaggtgcgcaccactacacctggctaaattttatacaatcttttgtagagatgaggtctcactatgttgcctaggctggcctcaaactccgggctttaagcaatcctcccacctcaacctcccaaggtattgggattataggcataagccaccacgcctggcccaacgtggcttttaataagtctttgaacatgctaggaggtatctcttgggctctattttgctgccactgtagggttctcaagtgatttaattttcttttattgttagctaatgggggagaattgccagctcccttggagtgaatcagaaagcctttgtgtcccgccataggtgtgctagaagtaatgggccttcacatggtttctggagaaggaaaagcattctgtggtctccaaagagcatgatgggtctcctgccctgcaaaagttctattgttaatgaaaacttgtattaaaaagcagaatttttagctctttattaccatgagggcttattttcttaaaatacaaaagttaccccgaggcaaagataatttcttgaaggtcatagttaactcttgcttattgaggtttgaatggtgttgtaagaaacagtggcttagctcttaaagcgtttgctttatgggatactacattttgatattaaacaaagacccacctcaatatatcatgtcacaaggaatacttaggccattcttagccaaagaaatgaagcaagctctagttccttttgggaaaaggaacatgctttgtattttacatatgtggtattcaccccaagcttattgggcacagaaatttgagtatagtagttactccctatccaaaggggattcgttccaatacccacagtggatgcctgaaaccgtggatagtacctcacctgaaccctatatctactatgtcttttcctgtatatacatacctttgataaagttttatttataaattaggcacaataaaagctcgacagcagtaactaataatagaacaattataacaatatactgtgataaaagttatgtgaatgtgttctctctctctctctccctgtctcgaaagtacagtcatgcattgcttaatgacagggatactttctgagaaatgggtcattaagggattttgtcactgggcaaacatcatagggtgtacatacacggacctaggtggtatagcctgctacatacctagattatatgttgctcctagtgctcctaggctacaaacctgtgcaacatgtgactgtattgaacactgttggcaattgtaatacagttgtaagtatttgtgtgtctaaacatagaaaaggtacaggatatagtcttacgggaccaccatcatgtatgcagttgcttgttgacccatgcatgtagggtggtgcgtcatggtatcttaatattttagacctccattgaccacgggtaactgaaactatggaaagtgaagccttggacaaggggtactgctgtatacccaattataaaactaagcttcaattttgacagcttcaaaattagaaaaacttcatagggaagtggtggtaacttaaatgggatattgattctgctcctactcatccttaggtaggggtgtttttaatgacagtggatcactaaggttgtggttctagaatcttgaagttagcccaaaacctaaatcttaacctcagtcagttwgtttgtttgtttgtttgtttattgagacagagtctcactctgtcacccaggctggagtgcagtggcatgatctgagctcactgcaacgtccacttcccgggttcaagtgattggcctgccccagcctcccaagtagctgggattacaggcatgcaccaccacgcctgactagtttttgtatttttagtagagacagggtttcaccatgttggccaggctggtctcgaactcctgacctcgggtgatccacctgccttggcctcccagagtgctggcattacaggcatgagctaccgtgcctggccacctcagtcttttaggatgatgggtgaatataaatttcagtctgtttcttttccaagctttctcatggcctagtctgaatcagatggttcatagtaattaccatgggttcagtcttgagtgtgagaaggggattcttagagacccagcagttttcacttctgaatcttaggttctcactagaacacaggtttatccttgaatccagcagttgggtttctgtcctttatgtgctgtatggatgaaggatgagttgtgggtatgagtgaataacctgaagaccagccctcaagtgtgaagtgtgaagcaaataaccaagtttaatctttttttttttttttttttaagacagggtctcgctttgttcaggctggagtgcagtggcacgatcatggctcactgcagcctcagcctgtagggctcaagcgatcctccttcctcagcctcctgagtagctgggactacaggcggatgccgctacgcctggctaatttttaattttgtgtagatggggtctccatttgttgcccaggctggtcttaaactcctgggctcaagcgatcctcctgcctcagcctcctaaagtgctgggattacaggtgtcagcgacgatgccagaccccaaatttaatcctaaagcagcagctgaaatagtttctagactgatgagactgtttaccttgagacctccctagagtcgttagtcttgaacacacagctttcctctgttgggagaaaggaggaaggaataattcactggatccctgtgaattccaacttaggggaggcatgataagaatttatagtgacctcttggatctgtaacaagaaagaggcagataaaaacaagagctctcctgatttctgtgaatggttcagaagggttcttaaaggtgctcagtattctctagggaggtagttaacgatgcagatgactggaccccactcacagaattcagtagagctggagacccaagaatctaagtttgtaacaaatgaacctgaaaacaagaagaccttctacatctgaaactaaactccaccaagcatttagtttttctctccccaaacagagaaataaactttgaatccttttttggtgtattcattagctttctttttatttgttttttcttcttatttttctttagagaaaggtttttcttctgttgcccgggctggagtgcaatagcaagatcacgctcactgcagcctggaactcctggtctcaagcaattctcaagccttagcctctggagtatctgggactacagatgctatgctaccatgaccagataatttttttactttttttttcttttttcggtagagaaggggtctcaccatgttgcccaggctggtcttgaactcctggcctcaagtgagccttccacctcagcttcccaaaatactgggattataagtgtgaagccactgtgcctggcctttattttcagtatttctagtcagatatttgctaagcaatctctacagctcgcagaaggtaggttcaaccaggaacaacattgttggctatttgatggttttcttttacatgggactaagcattattgcctacatatagggccaagccaatctgccttggtctgagaattgaagttgctctgaacagaaggtaatggtgtcagtgtcgcctttccttctgcacttgtcttcctcctgacttttcttctttggctctggtgctacagaagggcttcctgagttaccctctttcctacatcttcagccaggcagctagacaagtcaagagcttaggatgaatctaggctttaaagaggttggaagacctgtttttccttttctctgactgacccaaaagtataagacttttttttctttgtgtgtgatgatctgttgaacaaaaacgttcatttattccattgatagcctctggtataccaggacctatggtaggtgctgagaatatatrtatttattatagagcaattaacttattctttccaagaatctttgcttcctcactccttaagagtctgaatattttagcttctgggagattttaccttttcatcagctcctctgttgaataaacaaataaatgtaggtgtttgtccataaggctgctgcaaggatatacttctcttcactcatttttttccaaagccctatttctgggttggggcaggtgatcttttctttgtgattccagctaagtacctaccaagaaattcctcgtatgtctcagtatgaggggtcctctgtcctctcagtgagaatatcaaaagaaaaactgattttcagactcttcatgtgcatctttaatttcagtatctttgtcatccctagagccacttttctttctggtcattgaacactattttctagaagcatgattcaccactttttaaatctgtctctgtaaaatttatcccaagccacaaatacccataaggaaatttcatccttggtattataagtctatgtctctgaacttcacaacatctacacttctgtgctggctcccctctcccccacctccccagttttgttttgtttttttaactgtcataaaatatatgtaacaaaatttactatcttaaccgtttttaagtgtacagttcagtggtattctaagtactgcatgtaagtggactcgtacagtatttgtctttttgtggctgtcctatttcacttagcgtagtgtcctcaaggttcatctgcattgtagcatatttcagaatttcctttcttttaaaggttgaatcgtattccattgtctgtctaccacgttttacttttccattcatctgttgctggacgcttgggttgcttccatattttagctattgtaaatagctgtaattcattgttagaaatgtgaatttcttaatatctcttcaagaccctgctttcactccttttgagaatatacccagaagtggaattgctccatcatttggtgattctatttttaattttttgaggaaccaccatactgttttccacagtagctgcaccattttatattcctaccaacagtgcacaggcttccagtttctccacatccttgccaatacttgttattttctgtttttttttttaatagtagccatcttaatggatgtgaggtagtatcccatagtattcatttgcatttctctaatgaattagtgatattgagcatcttttcatgtgtttattggccatttgtatatcttttttrgagaaatatctatttatatgtccatgtttgaatcaggttgcctcttttcttttcttttgatacggagttttgccctgttgcccaggctgaagtgcagtggttcagtctcagctcactacaacctctgccccccgggttcaagcgattctcctgcctcagcctccagagtagctgggattataggcgcctaccatcatgccctgctaatttttgtatttttagtagagacaaggtttcaccatattggccaggctggtctcgaactcctggcctcaggtgatccacccgcctcagcctcccaaagtgcagggattacaggtgtgagccaccacacccggcctgggttgcttttttctttcgttgttgattttagtgcagttttaagaaactttttaaagccttgtttatgatagccaacactagtgactgtaatgtattcccctcgggaataagtaataaatctgtgttatatttgagtacattttgctcaaaataaagaatttaacgaattgtctcatgccaagagattttatgagtactttggctgttggtagtgccttactttcagaaggataatttttggagaaatttcacttcgtatttaggtatgtatggtctctcatcttggtcttggtgaatcagacttgtcataggagtgctccaactttcttgttggtagtagcttgagccctctgaaaagtaattaatccatacttcataaagagttgttctgaaattagtcacctctgtactgtactgtttttttttgttktttttttttttttttttgaggagtctcrctctgtcaccaggctggagtgcagtggcatgatctccactcactgcaacctctgcctcctgggctcaagcaattctcttgcttcagcctcccaagtagctggaattacaggcatgtgccaccacagccggctaattttgtacttttagtagagatggggtttcgccarttggccaggctggtcttgaactcctgacctcaagtgatcygcccaccttggcctcccagagtgctgggattgcaggcgtgagccaccatgcccagctgggagaagctttaacctggattcaggaacagaggtaggagaacctaagatcacaggcctcatctgacgtggtcattttgcacatacttcttagctttttggagatcttttcattttgtttccatcttaaataaccttttccctgtggagaaggtgccttttttggagagagccattaagattcttttatcctgctgcctgcctgagtattctgggaatcctacaaggatttgagggagcccttgggattccaacctaacaaattagttttctgtaatattrttctagtccatttagattgtgtaaatgatctaaatggtgtaaccatttaatatcaaaagtataacagcatttaagtcagcttttcgaagaaacttttattttttaactaaaaacaaactttttttcagagacaaggtctcactatgttgcccaggctggacatgaactcctgggcttaagacatcctcctaccctagcctcctgagtagctgggactgtgggcacacgccaccatgcctggccaaagacacttttttatagctctgcctgctgctataacaagtgttcctaaatacccatgtacatcctatattattagatttcctcaactctggttagctatgactgaaacattcatgccattgcagccagtgccctggaaagctataagcaagtcttaagacctgtgataagggctgacttgcaagctagctgccrtccatcttaatatctgacgagcccagtcatgttggctgtgtttaattgatccatttcctacttgcttcctcaacccagaggccaagggcagcacaaaaggatagtgaatctaaatgtctccagttttttgaggtataggaatctcctatgaagtggcagacctttgagaaatagtattatgagctgttctgttttgctgtggctttggaaaacctttggattcctctactgaaaatttgtttgaaaaaaaaatctttttaatgaaacagtgtgagtcataaagcagccaccaccccttctcataatagcatttctcaccaggggaatttttggtagctgttgggggagggatttgagtaggttgtggatgataaatcccttgaggggaacataaccaaaggctgccatatcagaacgctggtgctttccatgctgacaccaagccctgaattcaaagtgcaggacagcagaatagaacagagaagcctgtgctcagtgaattgctgcagtagcatgaccagtgagactggagtttcaattaaaacaccgttgtagtgtaaaaggatcatgagatggaaggaggccttgggttagagagccagaagccatttataggcagaacatcagctttctggattaaaggatggctgtggacctaatgatgagaatctagaggtcatggggaatttccttactgtctgtgccccccttttccatatggtcagcttggtgcttggcactgatcatggcacactttacaaaaagtggattcatataaggtcgtctgtgctcttctaagattttaggtctaaagcatttagagtggcgcccagaggagacgccacccagtcagcctccttgtggcatagtgaaaatgaaacatttagggatactgagagcttagaacaagccagaattatgatatcaaatctcagttgcctgtcttaaacttttctgccaacctagcgtgagttttagctgttttcaacttcattatttacagtttctcgggactcatgtctgaaccactatcttacataagctacagacgggaagggctgaacggttattagaaatgtgttaagatttgctttcctttggagagtcatggcctgtcttctgtgttttcctggctttgtacttttcttcaaagcctgttaccggttccaggtctccagagctcaataaaggggaaacaggaagtgagcatttgatgcataagagccagcaaaacataataaagggcacaggcatggaaccaggagagagaattgtgggagtgagttttcttgaaggcatcagttctgtaggattagagatacatccttcaacaatgacttttaactccttcaaacaaggaaaaagcaattaggaacctctgttcagaaaggaccaatttttcttaggttatatagtagaggttcaacactttcatatgacagcatacaagtaattataaagtatcttttgcctaaggagttcagaacacagagaaaagtgatgatcacctttataaaggagtaagaattacttctctgtctctttacttgagggcccacagggtaagtcttatcatgagttccagcctggagccctgactcttactttttctgtccattcaattttttttttttttccgagatggagtctcactctgtcgccaggctggagtgcagtggcgtgatctcagctcactgcaacctctgcctcccgggttcaagcgattcttctgcctcagcctcccgagtagctgggactgcaggtgcatgccaccatgcctagctaatttttgtatttttaggagagatggggttttaccatgttagccaggatggtctcaatctgttgacctcgtgatccacccgccttggcctcccagagtgctgggattacaggcgtgagccaccgcgccaggcctgtccattcagttttagtaatgaactctgaagttttagtcctgcggttactaaatggaaaagtcagagatttgtgctatttcaatttggttcacttgtacatttcaggaactcaaatagctgtgtgactctgaaaatgggaactctttggtgtcttggaattatttatttatttatttttaatttaattttattttttttttcgagacggagtctcactgtatcgcccaggctagggggcagtggtgtggttttggctcactgcaacctctgcctcccaggttcaagtaattctcctgcctcagcctcccgagtagttgggattacaggcaaacaccaccacacccgactaattttttgtatttttagtagaggccgtgtttcaccgtgttggccaggccggtcttgaactcctgacctcagatgatccacccgccttatcttcccaaagtgctgggattagaggtgtgagctgccgcgcctagcctggaattatttttttaaaaatgaaatattttaggcattcaagaaagataatatgctcacctaccaagcagattataataactaaaacattacaggtataattgtatgtaccctggcttattcccattttctctttccctctccaaagggaacgactgccctcactcgtgtttttcccgccatatatgttcatgcttttgctccctgtagctatccaaaacaccatttgttttctgtaaacttcatgtaaactgtatagacatggaaggagaaagatattatgaggtgtgtgtgtgtatatatgctacctcaaaatggaggtagtatataaattcattttactacttattgctatagcacatttattttcacagctatactctattgatctatttattgatctattgatctattctgttatcagtggatattaaagttatttttagtttttgaaaattttgtttcattacatacgtgaatgagtttttctagggtacatccttagtcatgaaatagtggggttacagggtatgtgtatgtgtgcatgcgtgcatgtgtgtgtatcttcaactcataattaaatattgcccagtaaatccccaatgtgcttataccagtttacactcctgaaataacatatttttgcttgttctgtgtccttgccaaaatttgatattgtcataccttaatttttgccaagctctagtgggtataaatagtataatattgtgattttatttgttatttatatatttgataatatatttatctataattaatgtattaatattgtatgtttaatcattgtgtttcttctgtgaaatacttgttcatgtctttgattcatgtttatattgggtggtttaactgtttcttactggtttgtacgaatttgtttttgttttgtctgtggataataattctttgttgtcatatgtaatgtagatgtgtcttctctcagtttgtggcttatctctttattctctttgtgatttcttatggttacttaattttgaaataactgaatattcaagtattttctcttatggcttatgcattttatgtgttaagaaatattttatttacctgaggtcataaagatgttatgttttcttctaaaagttttaaaaatttgcactttgtatttaaatccttaatccatgggtaattaaaaaaaaggtttattggccgggcgaggtagctcatgcctgtaatcccagcactttgggaggccgaggcggttcgagaccagcttgaccaacatggacaaacctcatctctactaaaaatacaaaatgagctgggcgtggtggcacatgcttgtaatcccagctactcaggaggctgaggcaggagaatcgtttgaacctgggaggtggaggtcgtggtgagccgagattgcaccattgcactccagcctgggcaacaagagtgaaattctgtctttaaaaaaaaatcgtgtatttagtctcaagacaggatctcactctgttgcccaggctggactgtagtggcgccatcaccgcttactgcagcctgaaactcctggagtcagatagtcctcccacctcagtctcctgggtagctgggactacaggtgtgcaccgccatatccgactgattcaaagtactgggataatagacgtgagccacagctcccagcctataattaaattagaatggggcaagatagggatatatatatttttccatatgtgaataaccagctctctcagcagcatttgaggagtagtaaagtcatctatccttgtgctaatacgcttttcttttcttttttttttttttttgagacggagtgttgctctgtccacccaggctggaatgcaatggcgcgatctcctctcactgcaagctccgcctcccgggttcataccattctcctccctcagcctcccgagtagctgggactacaggcgcctgccaccacacccagctaattttttgtatttttagtagagacggggtttcaccgtgttagccaggatggtcttgatctcctgacctcgtgacccgtccaccgcctcggtctcccaaagtgctgggattacaggcatgagccaccgcgcccggccgctaatactcttttatttttatttttttatttttgagacggagtctcactctgtcgcccaggctggagtgcagtggcgttatctcggctcactgcaacctccacctcccgggttcaagcaattctcccacctcagcctcccgagtagctgggattacaggcacacgccaccacaccctactaattttctgtagttttagtagagacatggtctcaccatgttggccaggctggtcttgtactcctgacctcaagtgatctgcctgccttggccttccaaagtgctgggattacaggcttgagccactgcacccagcctrtttttattttttgagacagagtcttgctctgtcacccaggccggagtgcagtggcctgatctcgactgactgcaacgtctgcctcccgggttcaagcaattctcatgccatagcctccagagtagctgggactacaggcgtctgtcaccatgcctggcttttttttttttttttttttgtatgagtagagatggggtttcaccatgttggtcaggctggtctcgaactcctgacctcaggtgattcacctgcctcggcctcccagagtgctgggattacaggcgtgagccaccgcggccggcctactgttttatttactatcgttttgtaataggtcttgctacatggaagggcaaaactgtgttggctaactgaatctttctaagggacaaataagggaatccagatagaataaacacartgaagtacagagtaccaggaactgctctgtttaaagctggtattcttttttaatgataggacatctggcaaacccaccctaatgggcagtttcatttttttccctactatattgcacaaacaataacatttcctgatgtctttgtattgcaaacagcagagtaaacagttctgtatgttacagacaacaacagtaaaaacaacaaaaactggttagctatttttggcactttgtgcttccagataaattttagaatcagctttgttaactttctgtgaggagaaaaaactgttaggatatttattagaattaaattgagtttatcaataagccatttttgtaaatttgggcttatccatgaatctgatagaattgatttacagatataaaaataaaaattttaaacattttatttacatttaaaatttttggaaataatttcagacttacagaaaagttgcagaacttatacaaataaatattacatatccatctcccagaattctcaaaggttatcagaaagataaatcattgacatccattatgttcttgagtctggaaagcagcttaagatcttaataaatacaacttttcaagtttaagaaatctatattgatctgctcctgggaattggagagccatgtgatcttaaaagtgacatggtgtcacttagactaggcctaaaactgagatctcctttaatcattgttggtctgtatccttatgtgaacagaaataaatccactgccactctctgctcccaaggtgcttggatccaatctgttgaaagaagggcttcttagacagttgtagggtagataattcaaatcaagttggcatcaggatgacacaagaatggcttctggaagtttggctcagctgagccagagatgcctttattggaggaatgggacaccctctcttgggagagacagtatagggtagtagttaaggtcacaggcttggcaccagactgtctttggtgtgaatcccagtgttgctaatttttggttttggaagcttgggcaagtgacctaacaacctgtgccttaatttctttacctctaaagtgaagctaacaataataacagtgtctatcatataggactcatatgaatcaaatgagtttgtagcatatccacatcactcacaacagtgcccagcaggtagtaagtgatcagtaatgtaagctgtyaatatttaatgtcactggataaagctttatgatttttttgaagatcttgaattccttttgttaggataccctatagttttggtccttactgttaatagtagcttttaaaattgtttataattgtttcgggtttcttgttatgctcttgtaggtttcatagttttaatgagaaatatcgacagaaaattcagagaatcacaccctttgcaaataatgactgttttgtttcctcttttgtaatcctcttttgtgttacttttctttcttattttaagattgctggctagttcctccagtaaaaatcgtattagaatctatgatcatgggaatccttatttttctcctgcttttttttaaagggaatgtttcctgcttttggaagcatcacatatgtttttggtatattgcctttattctcttttattcctactttgctaaattatcacaaacagcaattttatcaacagttttccttgtatttattcagatgatcatctgggctttctcctttcagttgtaaatgatttgaattatgttaatagattttctaatgttaaattatccttatattcttgaaattaatcctgcttggttgtgatgtatttttttaatacatttccagatttaatacgttaatattctcctttggatttttgcacatatgtcataaaatttcactcataattttgttatactgtctttttcttctcttactaagattaataaggcaaggcttggtggctcacgcctgtaatcccagcactttgggaggctgaggcaggcggatcatttgaggtcaggagttcaagaccagcctggctaacatgatgaaaccctgtctctactgaaaatataaaagttagccgggcgtggtggcgcgtgactgtaatcccagctactcaggaggttgaggcaggatgactgcttgaacccaggaggcggaggttgcagtgagctgagatggtgtcactgcattccagcctgggagacagagtgagacgtctcaaaaaacaaacaaaaagattaatatagctttttttttggtagagactactatgggttttttttttgtagagactactgtgttgctcaggctggtcgtgaactcccagtctcaagcgatcttctcaccttggcctcccaaagtgctgagagtacaggtatgagtcaccatgcctggacaaaatacagctttttatttattttcttgagacagggtcttcccatgctggagtgcaaagacataactgtagtattttcaaattttttttaagttggcctctaacttaattgcatgataatcacagaacagtctgtatgatactgattgtttcgtttttatttatacttaatttgtggcatactacacagtcagttttcataaatatttcatttgtactttagaagtttgtataacaactgttgggtgagggggttggggaacgcagaaaaataaaaatgttgggtgaagttttattctgtatgtccttacatcaagcttatcagttatgttgtccaaatcttccatattttaccaacttttgatttttgttttgttttgttttgttttgtttgtttgtttgttgagacagggtcttgctttgttgcccaggctggagtgcagtggtgcagtcgcggctcactgcagcctcaaactcttggactcaagcgatcctcctgcctcagcctcccgagtagctagaaccacaggcacacaccaccacaccctgctaatttttgtgttttttatagagatgggggttcgccatgttgcccaggctgggctcaggcgatcctcccaccttggcctcccaaagtgctgggattacaggtgtgagccaccgcgcccagccargtgttcttgatttaacaattccagagagaactatgttaaagtttttttttaatgactgaatttgtgaacttctcttcataattttgtcaaacgtgtctgcatataatttgaagttctctttagaattgtttcctagagaattgtagagagcatctttatccctaacagtactttttctcatggtctttttttgtctggtattaatgtcagctttctttttgtaaatatttgcctgctacatcttttcttatcccttttctttttctctatgtcctaatgtcttaggtgtatctcctgtgaatgacatatagttggatttttttccagcctattttgagactgtcttttgattggcatgtttaacccatttaaaagtattatgatagcaattgtgtattatcttaatatctcatttgataccttatgtaatttatttaatatcattaaatacattattatttcatatcttactttgtgctattgaccatgttttgtttgcatttttctccttttcagtcttttcttttcttttcttttctttttttttgagatggagtctcgctgtgtcacccaggctggagttcagtggcgcgatcttggctcactgcaggcccygcctcccaggttcacgccattctcttgcttcagcctcccaagtagctgggactacaggcgctcgccaccacacccagctaatttttttgtatttttagtggagacaaggtttcaccgtgttagccaggaaggtctcgatctcctgacctcatgatccgctgccctcggcctcccaaagtgctgggattacaggcgtgagccaccgcgcccggccccttcagtcttttcttagaaagggtttcattattctaccatttggaaactttcagttctgttacaggctactcttaaatttttggcttgcatgcttcattaaaatcttaaatcaatatctctactctcttcccaaatagaaatccacagtttgtcttacacattgctgtggatcggtattacaattctaccttgttttgtttgtttgtttgtttttgagatggagttttgcttttgttgcccaggctggagtgcartggggcggtctcagctcagtgcaacgtccacctcccgggttcaagtgattctcctgcctcagcctcgcaagtagctgggatcacaagtgtgtgccaccatgccgggctaatttctgtgtttttagtagagactctttcaccacgttggccaggctggtctcaaactcctgacctcaagtgatccatctgcctcggcctcccacgatgctgggattacaggcgtgagccaggcgcctggccttcccctttgcttttataccctggaattagttgttgctattcttatttgatgaagtctgcttatttgaattcactcacctgcttgccaacttttttgccttcccttccttcttttatcatacttcatccttttgagttaaatttccttcttccagaggtaggctttaacactgttttttagtgagagtctrttggtgctaaactctttttgcttacctaaaagtgtttttatttgtcataaccattggataatttagctagttataaaagtctgggttggcatttactgtttctcagcaattagatgatgttattgtgtttcattatcttctagcttttgatattactgcatttgaaaagtcttctcaactcttagagttaatgtttttttctcttggctgctttatcttgtctttactcatggtgctctccaaatttactgtcatatgttccggatttaatttatttttatacatctgtttgctatttgtccttgaatatcaaatatcatgtgtttcacagcacctaagaaattatcatctagttatctcttcaaattttacctttcttttattctttcccatccctccttttgaaaatcctagaaattttatattgggccttctgtctgccttcctgtttcttaaactcttttgtattttccagttctttatatgctttactatgggtaattccttatctctgttttcagtacactaatccttccgtccgtccatccatccgtctcgctctgttgctcacgctggagtgggctggcatggtggtgggcacctgtaatcccagctacttgggaggctgaggcaggagaatcacttggacccaggaggcggaggttgcagtgagatgagatcatgccactgcactccagcctgggtgacagagcgagactctgtctcaaaaatttttttaaaaaataattaattggctgagcgcggtggctcacgcctgtaatcccagcactttgggaggctgtggcgggtggatcacgaggtcaggagatcgagaccatcctggctaacatggtgaaaccccgtctctactaaaaatacaaaaaaaaattagccaggcatggtggcgggcacctgaagtcccagctactcaggaggctgaggcaggagaatggcgtgaacccgggaggcggagcttgcagtgagccgagattgtgccactgcactccagcctgggcgacaaagcgagactccgtctcaaaaaaaaaacaaaacaaaaaacacaaattaattaaaataaataaataaatttaaattagtgaaaattaatgaacaaaatttaaattccatttctgagttactctagccacattttcagtgctcggtaaccacaaatggttagtgactgctgtcattggaacatttccatcattgcagaaagtgctgttggacagtgctgctcaaaactcttccgtagtgctcttatagtacagagagaatcggtaaatgtgtaatttcagaaaatggatcaagtgaacttgcccttgtgctgagagtctaggaggttctctttagcatgataccattctgcatcaactatgtttaggaagaattcagagacggtgttgcattcttaggatgatttatgggatcattggtgatcccaagctgacttttctttcctgtaatttggtaattggaagaggagaaaccaggtaagcaggaacccccaatgttgaatacgctttggggaaaatggagaaaaatttctacattgattttatgcagctctgtttaatctgagactagagaggatgggtttgtgaggtgactggagaaaaacagcttaagttcttatgacttgaaatttgactcaagttggaaattccttgtaattaactcatcttttctctccacccccttaaattgccatctcattctcctttgagttgctatagaacagttaaagattctcaagaaaagataccttcccctaccttaccccccacattcacatacccacaccttctttaaataaagcatcatttaacagtgactggactccagatacaccaaggttaagaaagtcacaccaggccggacgcagtggctcacgcctgtaaacctggcactttgggaggccaaggtggatggatcacctgacgtcaggagttggagaccagcctggccaacatggccaaaccccgtctctactaaaaatacaaaaattagttgggcgtggtggcaggcacctgtaatcccagctactcgggaggctgaggcaggagaatctcttgaacccgggaggtggaggttgcagtgacctgagatcacgccacttcactccagcctgggtgaaagagcgaaactccatcaaacaaacaaacaaacaaaaaaaacaaaaaaaaaggtcacaccagcctgggccccaacaagctatgtaggagggaagagccactgacccccaacctttttctttggccatggctgacactgttataatttacctcactgtttattatggagccctacaggggctcagatccttttctttttttattttattttcttttttttttttgagacagagtcttactctgtcacccatgttggagtgcagtggtgtgatctcggcccactgcaatctccacctcctgggttcaagtgattctcctgactcagcctccccagtagctaggactacaggtgcgtgccaccacacctggctaattttttatttttagtagaaacggggtttcaccatgttggccaggctggtctcgaactcctgacctcaggtgatccacctgccttggcctcccaaagtgctgagattacaggcatgagccaccgcacccagcccagaatccttcttaacacagtactccaagtgcccacagtccatactaactgctggagttgatgtgtgagactaagcctgtttactgtccttggcttagggaattgaggctcggagtttactgttaagagaaggcatattgttactgattgcagagtacttactatgagccaaatatgttagttgagaacgtttttttaaaaagtctattgtgagtgtttattacctatgatacggagttaggtgcctagtaaaagttcagtaaatatacacatgaagaagtacagtaatcataggaataaagataaaggtagtttgtgttggaaaagagttgggttacttctttctggtgatttttgtagagttgtcagcagtggcttgggattgactttctgcaggaaattaatctcaaacaaaaaagatggcttgtaagatgacaggaaggggtttagaaagaggcagcatttgcagaaggaagaggaagaagttrcaaaagaaggaaagccctggagcaggtgagggagttggaaaggctgaactcgcacatgctgtgcagaagcagaagacaacagacctttgtggtttccaaatcagtattttctgtcttttaagcaaatcttttaagaaacaaaagttcttcctgcttctttcgtggtcacaaaaataatcagaatattcactgtgaagattttaaacattaatgtagaaagcggaagtttcccccatgatccctctggtgtatatgtctccaaatttttgcctctggatgaatgggtgtgtgtaaagcygtagaaagcacattatgcttgtttcacaacttctctttcttatttaatgtcctcttcattgtttcatgttgttccatgtacatgtgtggattttattattttatttaattaattaattaatttattttttgagacagagttgcactctgttgcccaggctggagtgcagtggcgccatctcggctctctgcaagctctgcctcccgggttcatgccattctcctgcctcagcctcttgagtagctgggactacaggcgcccgccaccacacccggctaatttttttgtatttttagtagagatagggtttcacagtgttagccaggatagtctcgatctcctgaccttgtgatccgcccatctcggcctcccaaagtgctgggattacaggactgagccaccacgcctggcctattttattttgtttttgtttctgttgtaatttctggaaacttgtacctggaagtgaaatctattcacagcacacttctccctgactatccccccaaaattgtgccccaaaatgcttatacctgtttagctctttgttagggaccatatctaccatttggccacaatttctctatgagttgttataagactaccacaggaaagatcgtatagcccctcctataaacttagtttgttcttagggaccaattaaataataagccagcaaagagctcgacccccactgcagaggacatttcgtaagaggggattcataggagccccactttctctttcccagcyctctgttctgaagaatctgaatgtgtctaacttgtttcagagttcactgtttctttccatttttctttctgatgggatgattgcttctgccaatggctagactagagcataagaaatttttatcttggatcgacatctgagagctctaaaagaaaacaccaggcagtggggggacggggtgggtgggattttaagtcaggcctgcaagaggcagctagtcatgggtctgcactcagcctggtgcttttgcttccttggggtgctgccaacagaaaccgttaaataggcagcatgctggtgaggcctatacatctgtctgggataggatcccacagaggggtcttgtgtgggattgatccaataaccccatagtttgagtcaggtgacaggtcagcaagggcctgaattttcctccctcttctagtgatctgcagaataatcaaatgaccaataactaagcatcttatttgagttgtaaaagaactctcatctgtgtttaaacgaacatttaaaatattcctaaaaaagaaaaacattctaaggttatttattttttttttwaagctgttgctgttacatgtgactgagcaactgtgtgggcaagagtaaaagtactggcatagaacctggaaacaagagtttagaatgaagttgaacccattacccaacagcaaggtcaatgtttatagcgttcccctgagctcagagcccttttggatgacgtgtcatttccttcatgcctctagaaagtggagaaacaggagcagattaggaaaagtacttggaaaaattctgtaatgatttgagccttagccaggcttaatacttcagtgtttgaactcttccctactgagacttttgctttcatagcagtttttcttggttattaaaaaaatatatacaacaaagtagatcgtaacagtagtatgtaataagaatatttctggccaggcgcagtggctcacccctgtaatcccagcactttgggaggcagaggcaggcagattacttgaggccaggagttcgagaccagcctggccaacgtggtgaaaccccgtctctactaaaaatgcaaaaattagcctggcgtggtggtgcgtgcctttaatcccagctactcaggaggctgaggcacaagaatcacttgaacccagaggcggcactccagcctgggcaacagaatgagactgtctcaaaaaaaaaaagaaagaaagaaaaagaatatcactaataacagacatttatttcatcttattaagtgcccggcacagttctaaatgcttaacattcaattattgaatcctcaccccttgaggtgattcctgttaacattcctatttcacagataaggaaaccaagacccagcggttagggaactcagccagtgttacatagctagaaagtggtgtggctctagccatgtatagtggctccttcctgtaatcccagcactttgggaggctgaggcaggaggattgcatgagcccaggaggtcaaggctgcaatgagctgtgatcacaccactgcactccagcctgggcaacatagcaagaccctgtctcttaaaaaaaaaagaaaataaaagtgctgtggctctaataaatggtatctcatgttgttattaaattgcaatcagtttggccatcaaaaattgaattgtgggaatcctttttagccctatagctgggcctatgacattctttgtagttttgtaaaatggtggagtagattttcttaccttgtcagccataagagttgccccctgtgactccatttatctgctgtttataatatcagtcctttcaaccatctttgactccagcaggaactacagcccattgaacctattttcttctccctttccctcacgccctcatgcctgtacttttctccttaaacaacttaaattccatggtcagtcattataatgactgcctcatgtactacactctcaatcctcttcccctcttttgccttgtcacacttgcttggctaaatcacaactctggttaaatccaaatctctgcctactttgtgggtgtgcccctgggttagaagaaacactgagcacattcgctgtcctcactcttaattcatgattactaaccttaaacaggcccctaatgctgtctgggaatcctgctgtatttccacagttccttcattctccagcctcctagaggactcttccatactttctcctctcttttaaaaacacctttcttagcctttgttgatgaccttcctatttcattgagaaaacaatggcactcgccaccgtatccacccacgtgcttgtatatctgccttttccccctttcctgtaactaggtatgagttgtacatgatccttgcaagggccaatacctccatttgcaaacaaaatttcattcccacttcctgagtccatccagagtgctgctccaaccttcctctgctctctgctaaatattaccgctctagtggtacattcctattggcatactaactgctgctatttcttccatcttgaaaacaggaataacaaattaacttatcatgattctacttcccctacagatactagtccattctggtactttttgttttttgttttttgtttttgagacggagtttcactcgacgcccaggctagagtgcaatggcgtgatgtcggctcactgcaacctctgtctcctgggttcaagtgattctcctgcctcagcctcccaagtagctgggattacaaccatgtgccatcacacctggctaattttttgtgtttttagtagagatggggtttcaccatgttggccaggctagtctcgaacttctgacctcaagtgatccacccaccttgggctcccaaagtgctgggattataggcgtgagcctctgtgcccggcccctgctacttcttttaagacgaaaagttctcaagaattctcttttcttggttttctgatttttcttcttccatcctccttgaatccactccactcaggtgtttgccctcatcactcaattgaaacagctcttatcaaggtcactgaggacctttgtactgctaaatccagtagcctattgtcagttctcagtttgggaaaagtggctgcattttacccagctggtcatttccttccccttgaaacactgtcttcactgcttctagaatacgatgctcacttagttttcttcctatctctctcattggttttatctcctttgcagattcctctttatctctctacctcaaatgttgaaaggcacgaaggcttagtccttgaaccaactctctttttatatatcacaaacttggtgaagtcattaatattagtggttgtaaatacagtgtgtatgctacatgtccagcttgactgcaatcttgaccttttttttttttttgctacatctccagcttgactgcagtcttgacttttttattattttattttatttttatttttatttttatttttatttttgagacggagtctcgtgctgtcgcccaggctggagtgcagtggcgccatctcagctcactgcaagctccaccttccgggttcacgccattctcctgcctcagccacccaggtagctgggattacaggtgcccaccaccatgcctggctaattttttttgtatttttagtagagacggggttctaccatcttagccaggatagtctcgatctcctgaccttgtgattcgcctgcctcggcttcccaaagtgctgggattacaggcatgagccaccacgcccggctgaccttttcttaaaaaacaaaacaaaaaactattattggctggactcagtggctcacacttataatcccagcactttgggaggctgaggcgggcagatcacttgaggtcaggagttcaagaccagcctggccaacatggtgaaaacccatctctacaaaaaaatacaaaaattagtcatgcatggtagcatgtgcctgtagccccagctgaggctgaggctgagcttggagaatcgcttgaacctaggaggcggaggttgcagtgagccaagatcatgccactgcactctagcctgggtaacagagcgagactccatctcagaacaaacaaacaaaaaatttattgaggctgggtgtgggctgatcacttgaggtcaggagttcgagaccagcctggccaacattgtgaaaacccatttctactaaaactacaaaaattagccargtgaagaaaaaaaaattagccaggtgttgtgttgtggtgaatgcttgtaatcccagctactcaagaggccaaggagggaagattgcttgaacccaggaggcagaggttgcagtgacctgagagagcaccactgcattccagccttggtgacagagcaagatgctatctcaaaaaaaaaaaaaaaaaaacctgttattgaaataattcacataccatacaattcactcattcaaagtaaacagttgaatggtttttagtatattctgagaattgtacaaccatcaccacatttaccatactcatgacagtacagaaataaacacatgcatctatggtcaactgattttcaacaagggtgtcaagaccattcaatagagaaagaatagtgttttcaatagatgctactgggacaactgaatatccatatggaaaagaatgtggtttggacccctacctcacaccacatacaaaaattaattccaaatggatcaaagacctaaatataagaactaaaactttgatctgcagtagctggaggaaaaaaaaaagagagaaatatttaaagaaaaagagaaaaaaactataaaactcttagaaggaaatgtagttggaaatcttactgaccttgcattgggcagtagtttcttaaatatgacaccaacagcacaagcaacacaagagaaaaataataaattttagaaccttttttaattagtccaaaaagaaaccccataaccattagcagtagctctgttttcctccattttcccctacccaagacaaccactaatccactttctgcctatgtaaacttgcctattctggacattttatataaatgggataatatataatgcatagcttttagcatctggtttctttaagttaccataatgttttcaaggttcactcacattgtagcatgcagcactttattcctttttttttttttttttttttgktaagacggagcctcgctctgtcacccaggctggagtgcggtggcgtgatttcggttcactgcaacctccgcctcccgggttcaagcaattcttcctcagcctcctaaatagctgggactagaggtgtgcaccaccacgcctagctaatgtttgtatttttagtagagatggggtttcaccacattaaccaggctcgtcttgaacgcctgacctcatgatccgcccacctcagcctcccaaagtgctaggattacaggcgtgagccactgcgccccacctgtttttttttttttagacagagtcttgctctgttgcccaggctggagtgaactggcgcgatcttggctctctgcaatctccgcctcctgggttcaagtcattctcctgcctcagcctcccaggtagctaggattacaggcgtgcaccaccaaacccaactaatttttgtatttttagtagagagagggtttcaccatgttggtcaggatggtctctatctcccgacctcgtgatctgcctgcctcagcctcccaaagtgctgggattacaggggagccaccgtgcccggccatgtccaaatttttgtgtagacattttcttgttttacttaaaaaaaawttttttttctaaggttttttgtttgtttgtttgtttgttttgtttgttttgagaaagggtctcactttgtcccccaggctggagagcagtggtgtgatctcagctcactgcagcctgacctccaaagctcgagtgatcctcccacctcagcttcccaagtaactgggactacaggcgcttgccaccatgcctggctaattttttgtattttccatagagacagggcatgttgcccaggctgttctcgaactcctgaactcaagcattctgcccatctcggcttctcaaagtgttggaattacaggcgtgagccaccacacccggctatatatacctacgagtagaattgctcggtcagttctactgtgtcgagtcaattctgccggatctacccggtagaaatgctgggtaactttaattgaatctttttgaggaattgccagcctgttttccaaaggaattgcacaattttatactcccaccaacagtatataagggttctgattctccacatcttttccaacacttattattacctgtctatttgataatagcagtcatagtggttctgatgtggtatcattatagttttgatttgcaaaggatattgggcatcttttcttgtgaggtttttttttttttttttttttttgatacggagtcttgctctgtcgcccaggctggagtgcagtggtacggtctcagcttactacaccctccgtctcctgggttcaagcaattgtctcgccttagcctcctgagtagctgggattataggcacctgccatcctgcctggctaagttttgtatttttgtagagatggggtttcaccatgttggccaggctggtcttgaactcctgacctcaggtgatctgcccacctcagcctcccaaagtgctgggattacaggcatgagccactgcacccggccttttcttgtttttattgggtcttcatatatagtccttggagaaatgtctatgcaagtcctttgtcaattgactttgtcaattgtcattgcactccagcctgggcaacaagagcgaaactccatctcaaaaaacaaacaaacaacaacacaaagaaaattaaagacttgtgctgcagaggatactatctagaaaataataagacaagttacagaatgggagaaaaattttgcaaatcatgttctgataaggaattagtatatctaaaatgtataaaaatgtcttacaactcaacaaccaaaagacaaacaattcaattaaaaaatttacaaaggaccagatgcagtagctcatgcctataataccagcactttgggaggccaagtcaggaggatcacttgagacccagaccagcctgggcaacacagcaagaccctgtctctacaaaaattaaaaattagttgggcatggtggtatatgcctgtagtcccagctactgaggaggctgaggcaggaggatcacttgagccaaggtgttcaaggctgtagtgagctgtaagcatgctgctgcactccatctgggtgacagagcaagactccactggattaccatggaaggtttaagggtactattggcaatacatgtagagtctatttctggactttattctgtttttctttatacgtctgtccttaagccaataccatgttcctttgattactgtggtgttataataagtcttgaaatcaaatattattatttgatttctttattctttttttaaattcttatttagggtattctcaggctttcaaatttccatataaaatttagaatcaccttgtttatttctacaaaaaaaaaaaaaaaaggaatgcttgcaggaattttgattgggattttattgaatttaaggataaaattgaggaaagttaacatcttaacaatattgcaacttccaattcatgaacacggtatttctctagcttcatttaagtgctatttaatttttctcatcagtgttttatagttttttttttttttttttttgagacagcgtctcgctctgtcacccaggctggagtgcaatggcgcaatcttggctcactgcaacctctgcctcccaagttcaagtgattctcccacctcagcctccaagtagctgagattacaggcacaccaccatgcctggctaatttttgtatttttggtagaagcggggtttccccatgttggccaggctcatcttgaactcctgacctcaagtgatctgtttccctcggcctcccaaagtgttgggattacaggcgtcagctattgtgcttggcctatagttttagaataaaagtcttgtgcacattttaaaatatttacctctgaatgattcttctttgatgttgtttaaagattgttaaaattaattgtgacaaaatacacttagcataaaaattacccttggccaggtgcagtggctcacgcctgtaatcctagcactttgggaggctaaggtgggcagattgcctgagctcaggagtttgagaccagtctgggcaacatggtgaaaccccgactctactaaaatacaaaaaaaaaaaaagaaattagccaggtgtgttggtgcacacctgtagtcccagctacttgggaggctgagccaggagaattgcttgaacccgggaggcggaggttgcagtgagcggagattgtgccactgcaccccagcctcgcgacagagcgaggctccgtctcaaaaacaaaaacaaaaaattaccctcagttatttaaaaatgtacagttcagtagtgttaaatatatttacattgttatgctaccaatccctagaactttttcatcttgccaaactataactctgtacccattaaacaactgctttccatttccctctcccctcagcaaccgccattttattttctatgagcttgaccactcttaataactcatataagcaaaattgtatggtatttgtctttttgtgactggcttatttcacttagcgtaacattctcaagatttatccatgttggagcaaatgtcagaatttacttcctttttatgtacataacacattttgtttgtccccattcatgcattgcatttatggacacttgagttccttctgcctttggatattgtgaacaatgctgtgaacacgaatatacaaacatcctttaagaccctgctttccgttcttttgattttaacttgattaatttttttgaggcagtgcctggctccgttacccagtctggagtacagtgcatgatcttggctcactgcagcctctgccccctgggttcaagtgattcttatgcctcagcctcccaagtagctgggattacaggtgtgcaccactatacctggctaatttttgtaattttagtagagacagggttttgccacgttgcccaggctggtctcaaactcctggcctcaagtgatccaccagcctcagcctcccagagtgcttggattacaggtgtgagccactgcgtccagttggctttcagttcttctggatacatatacccagaagtgaaattgctggatcatatggtaattttattttaaaatttttgaggaactgccataactttttcatagcaactgcaccattttaccattttacattcttactaacagtgcagtgcgtgagttccaatttcttcatatgcttgctgcaatccccaccctccaccccccctccccaggttcgagctattctcctgcctcagcctcccaagtagctgggactacaggtgtgtgcacaactatattttgtaatttttgtagtgacagggttttgccatgttgcctgggctggtctccaactcctgggctcaagtgatcctcctgtctcagcctcccaaagtactagaattacaggcgtgagccgctgcactgggccttaaaatgtttttcttatagaaagtatacatttgatttttctcttttttgagacatcttactctgtcacccaactgcagtgatcatgcaatggtgcgatcttgttgccacccgcaaatccgaatggctctgcagcaacctcaattcttggctcctcagaagaaagaattcaactgaggagcataggcagaaggagagactgaagcaaattttagagcaggagtgaaagtttattaaaaagctttaaagcaggaaagaagggaagtaaagtacacttggaagagggccaagtgggcaacttgagagatcaaatgcacggtttgaccctttgacttggggttttatatgttggcatgcttcggggtcttgtgttacttctccctcgattcttctcttggggttggctgtccgcatgcgcagtggccgccaacacttgggaggggccccatgcacagtgtgcttcctgaaattgtgcacatgcccacttgaggcattcctttaccagctaagtgttcctagagaaaggtcataaactagttaaactctgccattttgcctcttagtgctcatgcctgagcccactcacccaactcctaagagcttattgggatcaccagtttcagctttttctatctactgggagactaccgttctctggcaccagttgcgaccaattattattttagggggacagcttaacaactgcctgaccatcacctgatggtcacctgacattcctggttgggggtgtgaggggacctctcctgctctgctcatgttttactagctacctcctataacaatctcagctcacagcagccttgacctcctgggctcatgtgatcctcctacctcagcctcctgggtagctgggatcacaggcatgtgccatcacacctagctaatttttgtttatttttcgtagagatgagctctccctatgttgcctagcatgccaggctaatttttgtattttttagtagagatggggttttaccatgttagccaggctggtcttgaactcctgaacctcaagtgatttcctgtctcakcctcccaaagtgctgagattacagccgtgagccactacaccgggcttgatgttgctttttaatccagactgacagtctttgcccctaaactggaatgtttatatttaatgcagtcatcaatataattgaatttaaattaattatcttgcttatttgtttcctatccaatactttcatctgtttctttttttttttttttccctctccttctttccttcatttggattaagaaaagttcttatttttttggccgggtggacaacctgtctaaatgtagaaacaacttcattcattttctttctcagctgttcaaactttaaatgtttaaaagggatactaatacctttgtgataactgggtaaagatttgtccagattacacctggatggtatatgtttgtatgtatgtattatacacacgtatgtttaattccctcggccactctgaattgagccatatgtgatttcatttctttattatgtttgcttagagtatattcgagaagatgcttggactatgcagcacttttataggtccagttgtgttgatttgggagagaagagagaaggtgagcatgaacttgacagttcttgtgtgcctgttctgtgccaggcacttggttagtactttacacatgctcttatttttttcctcacaacaatcccaagaggtggaaataaactatttccatcttacagatgggaattgacagagctagaatttcaatctgtcgattccagcagcatcttttgaagctttcatgatgagcagaatggatgatactgttgagatctgtattcatccaggatcttttgttcctcctgtttcagcaaactcttaagattggaactacatcagtagataggtgtgcaatgccagtcttttgcctcatttattaaacaaggcagccgggaagtactcagttttaatgtcacttggtcttcactcttttgtttttttgttttgttttgttttgtttttggagacacagtctccctctgtcacccaggatggaggacagtggcgcaatctagtctctgcctcctgggttcaagcgattatcatgcctcagcctcccaagtagctgggattacaagtgtgcaccaccatgcctggttaattttttgtatttttagtatagacggggtttcaccatgttgaccacgctggtctggaactcctgacctcaggtgatctgccacctaggcctcccaaagtgctgcgattacaggcatgagccagcattcctggcccactcttcttgtttgtgggtagatctcccccaccccagaccttctctccaattcaccttttcttccatctcctttaacattgtaaaaaatggtttctggaccccaaatctatgaatagaatgtgcttagaggcaggagagtactgagctgaaaacatctcactaaccactgattttagttagcatggcctttagaaaggagttaaagcactcatataacctgttttcctaatacaaaatttgggaagcaacaaaaccttttgctgacaaatgtggaaaagtctatgatgaggaagtggattggatcttgcttgtgaacacttattttcttccttctggtagctagatttcaagcttctcttattcctgagatgtagtgaccaagttcatatatgttgactatgattgcatatcatttacctagaagaatattctagggcagacttgaagcctatttttgttgtctgttgttaggcaacaaaacctacctcaaaacttaatggcttaaaacaacatctattttatatttgatcataattctatgacttgggaattcaggcagggctcagctggatggttcttctctatgtgactaacagctggggtgtctcatgacattgtagtcagtgactggaatggctaagatggcttcattcacacatctggcaagttggtgggcatgatgaggaggcaaagccttctctctctcgctgtggctgtctccctagttgtgactagcttggcttttgttatttggaagctaaattccaaaagtgagcataccaggcagcaaaggcagaagctgtaattctcctagggcctactagccttggaagttacatgatgtggctttctccaccttccgttggtcaaaacaagaatttggtttggcattgtgacaaggggaagggcaggagaggggacattgctgaagagctggtaagatggacactattgttgcaactatctttagaaacataatttaccacagaacactttccttggggagcttgagccccactgtaagccagttaaataagaatctctgaagaaacagtaagatgctctccaggaagtcctgtgtgtgtgttcttctaagcacgatctgcagtctggctctttctgtttcatacaacatggcattccagtgtgcaagatgatgagtcctcccactcctttgagccatactgataagagaaattgaaaataatttaagtgctgttattttttttttctaggacacagtcctacttctgtaaaatttccccatctgctccagtatacagtgatgttgagtactattgttttataatcactggtgaattcctggtaagaaccatatcttcttctgtgtttaatctctgtgttaagcacagcattacattccagtaggtatgtgataaatccttgaattgaaccattgaaaatggcactgttgctgctgttctcagtgcctatcagaattgtgcagaattaatagttcctatagatctaacaattacatacccctgttaaaaatatagaaaaaatgtggttttgaaatgaacagatttaaaattagactaaacttgaaaagtggcctaaatgtttttaatggcaaaaactttctgttttatttattatttttaatttgtttggaaaacttttttttttaatgtggaagcatatttagaatactgtgaataaatataagttgctttcctgcaaattgctttatttagggaggccaaaggcagaaccctaaagactttagaaccacttaaaatacagataatttacttggtcattttcaacccaggaacacacagattttactcttgaaactacttataaaaatccttggagttaatggtatacgagagtgttgtagctcatggagtactaaaccatgagatcaatcataagattctccctgatacttgtaagaggtacagattcccaggttcccctttgttagagatttggatataatacatctctggtgagactttgaaatctctgtttttaatgactggtcctggagcttttaggaatgcagatttatgggccccaccccagacctactgaatccagtgggaagagaggggttggtctgtcaacaggtgttccaggtgattcttacgtgtgctgttgttgaagaagcactgttaatagagaaatccctttcatagttctttgccagaaaactacagttctaccagaaagtatcccaaaagattttcactgtatataggaacctgcagttagggatcctccagatgttgtgggatattggtkgttactgttttgaaactgaggtatagttgacataccataatattcatacattataaatgtacaatgagatttagtaaatatatagttatgaaaccatcactaaaatcttttgtttctttcttttctttcttttttttttttttttttttttttgagtcttactctgtcactcaggctacagtacagtggcatggtcatagctcaccgcagccttgaccttctaggctcaagggatcctccttcctcagccttccacgtagctggcactgcaggcgagcaccaccacgcatggcttaaaatccaattttataacacttccatctctcaaaaagtcctttttttatttttattgttttaaaacaagggtgtcactctgccacctaggctggagtacagtagtgagactgtagctcactgcagcctcaaactcttgggctcaagcaatcctctcactttgtcctcccaaagtgctgggattacggatgtgaaccaccacatctgaaagggccacttcagaaagttcctatgcctgtttttagtcaatctctgctccccaccgggcaactgctatctctctagatttgccttttctgggaatttcatataaatgaaatcatacagtatgtattattttctgtttggtgtccttcactcaccatgtttttgtttttgttttttgtgggttttttttttttttttttttttttgagacagagttttgctcttgttgcccaggctggagtgcagtggcgcaatctcggctcactgcaacctctgcctcctgggtccaagtgattctcctggcttagcctcctgagtagctgggattatgggtgcgcgccaccatgcccagctaattttttgtatttttagtagagatggggtttcatcacgttggccaggctggtctcgaactcctgacctcaggtgatccacccaccttggccttccaaagtgcagggattacaggcataagccaccatgcccagcccacttaccatgtttttaagttcatatgtgttgagtatgtatcagtagtttgtgctgacatcggtagtttttattgctaaatagtattccattatatgaatttaccacagtcagtctatccattcaccagctgatagacttttggattgtttctagcttaagacaattatgaatgatgctgctgtgaacattcatgttcgtgattttatgtggacataagattccatatgagaagtttgtgtttaaacgtttgagaaactggcagccttttccaaagtggctgtacattttacattttcatgggcaatggttgagagttccagttttgccacatccttgccaacaccgtgtattgttgacttacggattatagtcattctagtaggtatgtagtggtaccacattgtgattttaatttattttatttatttatttatttttgagacagggtctcaccctgtcgcccaggctagagtgcaacggcatgatctcagctcactgcagcctctgcctcctgggttcaagtgattctcccacttcagcctccagagtagctgggactacgtgtgcatgccgccatatccggctaatttttgtattttttgttacagatggggtttcaccatgttggccaggctggtctccaactcttgacccaagtgatacgcccgcctcagcctctcaaaggtctgggattacaggcgtgagccaccgtgcccagtcctcactgtgattttaatttgtatttcgttagctagtgatgatcccttttcatgtgtttaacaattcacttatcttttttggtgaaatgtcaattcaaatctttgcttgcttgttgttttctgtttttaagacttaattctctcaggagttcgagaccagcctggccaacatggtgaaaccccatctctactaaaaaaaaatatatatatatataaaattagctgggcatggtggcagacgcctataatcccagctactcgggagcctgaggcaggagaatcacttgaacctgggagacggaggtcgcagtgagctgagatcatgccactgcagtccagcctgggcaacaagagcaaaactccgtctcaaaaaacaaagacttaattattttaatagagcagttttaggttcacagcaaaattaagaggaaggtccaatgattttctgtatatcctcatttttwaaaattgagttgtttgtcagtgagttgtaagagtttatgtattatgaatatgtcttttgtcagatatgatttgcaactattttctcccaatgtgtggcctgtgcttttatttgcttatatggtatctttggaagagcaaacatttttaattttggttgtctaatttatcaattttttgcttttatgaatgatgcttttggtatatgtaaaaaaaagtgtctagaccaaggttacaaaaatttctcctattttcatctagaagttttatagttttagctcttacatatgtctgtgttccattttgagttaatttttggatatggtatgagggagggagtgtctgtttctttctttttttttttttttttttgtaaacacacatatttctagttgtagcaacatcatttgttgaaaagaccatcctttcttcctgaattcccttggcagaatcaactggtcataaatgtagtggtttatttctcggctttcaattctgttccattgatttatgtgtctgttgctattgtggttacttgtaactttatgataagttttgaaattgggtagtgtacagtctccatttttgttcctctttttcaaaataatgttgggttttgactatcctaggtcctttgcatttccatgtacgttttaggatcagcctgttgatttctgcagaatggtttttgaatcctgatattttttcattcagaggtccttgtgacctctcacagagggcctgaaatgtgctcactgctctttagaggttataataagcgaaggcctgctgtacaccaatgcttgatgtattagcgttcttccaggtttggcatgttgggtttaacagctagtgggaacgcaggccaaggccagctccgggacggtaaagatgacccttgagtgcttcccttggtgttatacttggtgtcatcccacctccttgtctcactggtagttggcactccaaaaatacttgaatagaagtgggagactgtctacaataaagaacaagttgagactgatgcatttatcatctctcctctttttgagcctcctttgttttaaagccgtatttataccaatgagtttctaagcagcctggccaagtctggttccctcagccctgagctgtggccagcttcatggttgattgcatttatcagatttttttcacctgttcttgcctaagcctgtaacacattatcactgaaaccagacatggttttatcttttcagaagcttgtgagaggaaactggtgcttcccttcctcagttttactttaaggaacattttttctctttcttgtaaaatttggctgttcttcttttacattttagacatgtgtttgttttgaacaggctgccttccaaaactgtacagttcttatcttccttctacctcaccaggcctttttgtgctggattcactcaaacccagctaatacttacagaacatttaactataatatatgcaaggaatcattttcagtcctgatagatacacagaaatggataagacatggttcttgccctcatagagctcacaatctgataaactctgataaaagagacagtatatggcatatatacacaggtatatatagcatgtaagagacatgggggatcctgggttgggtggagtactggttttccacgaaacctgttgcatatcaggagccagccattcttgctttgtacyttttttttttttttttttttttttttgagacagagttttgttcttgttgcccaggctggagggtaatgatgcgatctctgctcactgcaacctccacttccctggttcaagccattctcctgccttggcctcctaggtagctgggattacaggcatgcaccaccatacccggctaattttgtatttgtagtactggctaattttgtgtttgtrgtagagacgtggtttcaccatgttggccaggctggtcttgaactgctgacctcaggtgatccacccgcctcagcctcccaaagtgctgggaatacaggtgtgagccaccatgcccagctgctttgtacttttaaaatgtgatcttgactttcagaatttaaactttggaatttcttagagtggtttagatgtcaccttccctaggtgtaggacagatagagctctgactttctttaaaatttattttattttttgagacggagtctctctctgttgcccaggctagaattgcacagcttactgcaacctctgcctcctgggttcaagtgatcctcccacttcagcctcccaaatagctaggactataggcatacaggcatgcgccaccatgcccagctaatttttgtatttttagtagagactggcttttgccatgttggccaggctggtctcaaactcctgatctcaagtgatctgcctgcctcggcctccaaaagtgctgggattataggcatgatgagccactgcacccagccatttttttttttttaaatagagatgggggtcttgctatattgcccaggctggtcttgaactcctggcctcaagcgatcctcctgcctcataaagtgctgggattacagatgtgagccaccatacccagcccaagctcttgactttcaggcttcctcatcctgttgacttctctgccactaatttcacaaggcagtatggccatatttttaattaagttatttgatggacatacccctttcccttggaaaagggactgcgtttataacaaatgaaccatgaatggaattcttaaaagtgaagtaacataatatgttaagcagcttatctgttatttaatataattccctaaggagagcttagtatggtgctctgtcacccatgggcctattcaaagtggaattcctttctctaatgttgcataatacttccaccagaagaaggaggtggtagagtgtttgaaataattattgtgttagctgctgcccctgtcctttttctgtaatgtgggaaacaaacttcgtcttaggatcttctggcaggtgtcctggttggatcgtgggtggtgcttgtccggctgcctcaaggatccagcctagggacatgttctttgagcacttgatgtgagagttttatttgtttgtttgtttttaatttaacccacacccatgcaaactatgttccccatgccaggaccagaataaccctggccagggctcaagaaaaacctagtaacagacctaaaattaaatacatgaactctgcctgcccttttgcatttgcattatggttttttgttaggtgctcttgaccattttttttctattaggaaaaggctgggaaggagaagcttgagtcattaccttaggcatagagaggggatggatgagctgtkaagattactactaataagtagaggtgggaccagtgcaaattgtgctgggtgcaatatttttttttaacttagcaataaagatgctatgacagtgtcaatcgctggctttatctgagccatccatagtaatagacttgtttgtttgtttgtttgttttttaagagacagggtcttgctgtgttgcccaggctggcctcctgccatggccatagcatggtcttgactttgagtgtgaacctgcatctggtgccagtaaacctaacttgctcagctgaatcttcttcttcgtctttttttttttttttttttccagagacagggctaattcacccaggctggagtgcagtggcatgatcatggctcactgcagtctcgaattcctgggctcaagtgatcctcccacctcagcctcccaaatagctggcactacaggccactgtgtcccgctgtcatttagaatttaatgtttgctttttttttwatttttatttttgagatggagtttcactctcgttgcccaagctagagtacaatggcacgatctcagctcattgcaatctccacctcctgggttcaagcarttctcctgcctcagcctcccaagtagctgggattacaggcacgcaccaccatgcctggctaattttttttatttttagtagaaacggggtttcaccatgttaaccaggctggtctcgaactcctgacctcaggtgatctgcctgcctcggcctcccaaagtgctggtattattacatgtgtgagccaccgcgcccagccaaatgtttgcatttatataggcctcaatgagttgggtgtttcattttgtgttttgttttgtttgagacagagttttgctctgtcacccaggctgaagtgcagtggcacgatctcagctcactgtaacctctgcctcctgggttcaagtgattctcgtacctcagcctcccaagtagctgggattacaggcatgtgccaccacgcccagctaagttttgtatttttagtggagacggggtttcaccatgttgcccaggttgatcccgaactcctgacctcaggtgatctgctgccttggcctcccaaaatgctgagattacaggcgtgagccaccacacccagctgttttcttctattattattttttatttatttttttatttttttgagactgagtctcgctctgtcgcccaggctggagcgcagtggcgcgatctctgctcactgcaagctccgcctcctggattcacaccattctcctgcctcagcctcccaagtagctgggactacaggcatctgccaccatgcccggctaatttttttgtatttttaatagagacggggtttcaccgtgttagccaggatggtcttgatctcctgacctcatgatcagcccacctcggcctcccaaagtgctgggattacaggtgtgagccaccacgcccggaatgaagtatttcaggtatacgggacagtacagaaaaataatatagtgatcatctacgtgttagcaccaaaatgaaatgtttatattattttttatttctgtggatttctctgtacttgtaccacttataagaatccccacaattttgtgtgtatgttaaaagtggatataatctgtctcttgccattaaaaaaaattaagcattatgtttttgagatgtattcattacagatccaccccattcatttgaactgctttatagtgttcccttaatatgtggataaatatacctcaacagatttatttatttattttaagagatggggtcccaccctgttactcaggctggtgtgcagcggcatgatcacagttcactgtaatcttgaactcctgggctcaagcagtcttcctgcttcagcctcccaagtagttaggactacaggtgcatgccaccatgcccagctaattcttaaattttttgtagcgatggattctggctatgttgcccaggctggtcttgaactcctggctacaagcaggcctcccagagagtcgggattacaagcatgagcttgtgcctggctcaatttatttatttgtattcatagcaaggggcagttaacttgattccacgtttccgtggttagaaatagagtcacaatgaacacttttgtgtctgtttgttttctaattgttattggcatgtggaggagtgctgttgacttttgtgtgtgtagatcttgcgtctagcaactttgctgaacttgtgttagttattamcatttgtagattttcttgcctttcctaatatagataatcatatcacagctgtttcctccttttaagcccttaaatcttttgcctaccatgttactttgctagggctgctgtactaccaactgggtagcttaaacaacagaaatgtattttctcacagttctagaggcatggcggccgagatcaaggtattagcagggttgtttcttctgaggcctctttccttggcttgcagatggtggtcttctccgcttctccgtgtcctgacatggtcttccctttgtatgtgtctgtgtcctcatcattctttttttttttttgagacaaggtctggctttgttgcctaggttagcatgcagtggtgtgatcatggctcactatagcctcaacctccccaggctcaggggatcctcctgcctcagcttcccaagtagctggaactacaggyacgccgccacgtctggctgatttttgtattttctgtagagatggggttttgccctgttgcccaggctcatctcaaactcctggactcaagtgattcacctgccttggcttcccaaagtgctgggattacagacatgagtcagccccagcccctaatctcctattctcatatgaacaccagttatgttgaattagggcccaccccgatgacctcatttttacttaattacttctttacaggccttattttcaaatatagtcacattctgaagtactggaggttaggacttcagcatataaatttggggagggacactattcagcccctaacattgaataatgctggcttggctctctaattcaccactgaattaaagcagtgaaagtgggcatccttgttttgttcctgaccatagagagatttaaaagagaatgctcttaaaatttcgcctttacaagtggcagttgatgtgggtttctagatacctttcactgagttgaagaaattcccttttgtaacttgtcggctctcgagaatagaaccattagggcctgcctttrccagttaagcatttttggcagaaggactgcacagatgatgatgtgtccttcccactgcatcctatcaggaagctcatgatgtcagtctgtccgtggcttggttcgggtgatctctactaggcaaaggtgatctgtagctgccaactctgaaatggtgcgcagatctcgtttcccagtaacctttgaccggtggtttttaaaacctgtggataatccttacattcattgaattaaaaaaattttaatgactatccttttcatttcaagaaattgtttagttattttttttgtctactttgtccttccttccattctttattagttttttatttgctggaatttggaatccctttttttttttttgagrtggagtctctcactttgtcacccaggctggaatgcaatggtgcaatctcagctcactgcaaactccgcctccagagttcaagcaattctcctgcctcagcctcctgaatagctgggactacaggtgtgcaccaccacacccagcttctttttgtatttttagtagagacagggtttcaccatcttggcctggctggtctcaaactcctgaccttaggtgatctgcccgctttggccccccaaagtgctgggattacaggtgtgagcaccacacccggcctggaatccttttttttatgtctttaatcttttaaaaattttttagaccaggtctcgctctgtwgcccaggctgggtgcagtagcacgatcatagcttactgcagcctcagccttccaagctcaggcaattctcctgcctcagcctcccgagcagctgggaccacaggtgtgcaccaccacacctggatagtttttaaaaattgcttgtagaggctgggtgcagtggctcacacctgtaatcctaacactttgggaggctgagatgggcagatcacttgagctccggagttagagaccaacctgggcaatatggcgaaactccgtctctacaaaaaatgcaaaaaacaaatttcgctgcttctacttacttctgtacagtaagactagcccacagagtggtcctttgtaccttcgcccggttttcttcagtggtacatcctacataattacagtgcaatagcaaaatgaggcaattggcatgggtgctgttagtaccatccatagaccatattcagatctcatcactttcacatgcacccatttgtgtgtgtgtgtgtgtgtgtgtgtgtgtggtttagtgcagtttcatcatacatatgggtttatgtatccaacatcacaatcaagataactgttccactacctcacagatccctaatgctgcccattatagtcatacccatctctcttccctcctccccatccctaataccagtcagccactagtctcttctccagctctagaatttcatcatttcagtaatgctatataaatggaatcatagggcatgtaatccttgggattggctttcttcacttagcataattctccaaactcttgtgtatttcaatagtctattcctttttattgctaagtagtagtccatggtatggatggaccacggtttgtttaatccatccgaggacctttttaaaatacttgtgcccagatgcagtggctcactcctgtaatcccggcacttggtgaggtcraggcgggaggattgcttgaccccaggaattcgagaccatactgggcaacatggcaaaaccctgtctctacccaaaatacaaaaattagctgggcgtggtggtgcacacctgtagtcccagctacttgggagactgagatcagaggatggtttgagcctgggaggcagaggttgcagtaagctgagattgtgccactgcactccagcctgggcaacagagccaggccttgtctcaacaatcaatcaatcgatcgtgtgttcctgatattaaaaaaaaaataaaaatacttgtagccgccgggcacggtggctcacgcctgtaatcccagcactttgggaggccaaggcgggcggatcacgaggtcaggagatcgagaccatcctggctaacacggtgaaacmccgtctctactaaaaaaatacagaaaaattagctgggcatggtggcaggcgcctgtagtcccagctactcaggaggctgaggyaggagaatgacatgaacccgggaggtggagcttgcagtgagccaagattgcgccactgcactccagcctgggcgacagagcaagactccgtctcaaaaaaaaaaaaaaaaaaaaaaaaaaaaaaaaaacttgtagccaggtacagtggctcacacctgtaatcctagcactttgggaggctgaagcaggaggatggcttgagctcaggagtttaacaccagtgtgggcaacatggtgagaccttgtcgctacaaaaagaaaaaaaaaaaaaacaaaacctgggtgtcgtggcacatgcctgtagtcccagttactcaggaggctgaggcagtaggcccacttgagcctgggagttcaaggctgcagtgagctatgattgcactgtacgggtgacagaccaccccctccactactacccacctccaaatacatctatttttttttttctgagacggagtctcactctgtcgcctagtctggagtgcagtggcacaatctcagctcactgcagcctctgcctcccgggttcaagcaattctcctgcctcagcatctcgagtagctgggattacaggtgtgtgccaccacacccagctaattttttacatttttggtagagaaagggtttcctcatggtggccagggtggtctcaaactcctgacctcaagtgatctgcccgccttggcctcccaaagtgttgggattacaggcatgagccaccgcatccagcctgcatcttcccctttttttttttgggggggacggagtcttgctgtgtctcccaggctagagtgcagtggcatgatctcggctcactgcaatctctacctcccgggttcaagcgattctcctgcctcagccttgtgagtagctgggattacaggcatgtgccaccaykcccaactaatttttgtatttttagtagatatggggtttcaccgtgttggtcaggctggtctcgaactcctgacctcatgatccacccacctcagcttcccgaagtgctgtgattacaggcatgagccacagcacacagcccatctttttttaaactatgtttgtttaatcatcacaaatctattcatctatccactcctttatttatctatccacctcttattttgtacacatttcaaagtaaactatagacatctgtatacttatctttaaatatttcaatatgtacatcattaactggtgttaagtatttctttatagcttttcctcttggtggaaagtttacatacaaagaaatgtacacattttaagtacatgttcactgggttttgacaagtacatgcatcagcaaaacccaaaaccctatcaagatagagaatgtgcccgggcgtggtggctcacgcctgtttttccagcactttgggaggccaaggctggaggattgcttgaacccagaagttcgagaccaacttgggcaacatggtgaaaccccatctctaccaaaaatacataaaaattacctgggtgtggtggcgtgcacctgtagtctcagctgcttgggaggctgaggtgggaaaattgcttgagcccaggaggcagaggttgcagtgagccagcatggcaccactgcattccagcctgagtgacagagccagaccctgtctcaaaaaaaaaaaaaagaaaagaaaaagataatgttatgttaccccacctgcctcacattgtgagtcagtagactcatagttgggtccaaacataagatgtttgtaaaaaggtccctgattttgaccactacccttttaaataaagaagcttggggatgtgaaagtcctcctccaggtcagcaggcttgtttaaggtgagaccatgtcctctgacctcagggctatgactgccattctcacttcttcaaggccacctccatttccagcaggcaggtgtgtcagacagtaaaattgagagaactgttcagtgaacacccatataaccaccacctcaaccgtgcagccaacattgtctatattgctttatcacagactgtctatacagccttccctccatcgatctgtctgtccgtccagcttactgttgtgatgcatttcacaaaatgcactcttaatcattgcatgatctcttttgtgattttgctctgtggaacacaaacttacagagttaaagcaaggctggcaacccatgtgaaaatgaggagaatctgagccttttcatttgctgccactggggacatgatgtgaatcggcgccctctgacttagctccatggggcctctggattggaagtgagggaggagcctcctgagcaaatggactgaaattcctgccctaggtaggctgattgccttcctgaagctctatttatagatcgcagaggaaatctagggggctttatctcacttcccaccccacataataaaactggttcaggtgggtggctagaaccttaaagttaaacatcaattatctaaatatacatataaggtgggaatagagggtcagaaaagcatttttgttctctaacttgaggactccagctaaaaacataaaaatcgccaatggctgggtgcagtggctcatgcctgtaatcccagcactttgggaggccaaggcaggtggatcacctgaggtcaggagttcaagactagcctggccaacatggtgaaaccctgtctctactaaaaatacaaaaattagccaggcctggtggcacacgcctatagtcccagctactcaagagactgaggcaggagaatcgcttgaacctgggaggcggaggttgcggtgagccgagatcacaccattgcactccagccttctgtgacagagcgagactccatctcaaaaaaaaaaaaaaaaaaaaaaatcaccaatgtccagtggctgtcactatcaggggctatttgtgagcttccctaatgcccatgatagatgtgccccgtgctgtaaaacacatccacctattaaataagcagagtggactcacataagtagtaatttcctcacaagctcagaaaatgtcttttcagtttgtactttggtgtgtacacatcacattttggagaaagtctagactttagaaaagagcctttagggtattcccaggttgttcctgggctcctgtactccctgttcaggtcacctctgctggctttggctcattgtggccacgcaagttctttgttacatattccctttggtgatcagagtcttcccaagccatggtcaaaactttacttttcgtatgaactatgtgtcttccccttcagggaataggactgatgccatttgagattatttcttccttccttgttgacaattccctttgtactcccccaaggccctaagcaaggacccttagtttcctctggtttcgtggttcctgtgaaaaaggcagaagcccatgtggaaaatcctcatcctgctgtgtttcaacaagcaaagtgcattttgtctttcagagtgggaaggaccttaactgtgttgaccagaagtgcagttcctggcttcagccattttgctttggagaaggaaaataaatgcagtgacctttgttgtgagggtagggtactcttgttctaaaagtccatttgtggtgaggcgtggccctgctgggagaagctgatgccactttgcctccctggcaccctgccagttctgtctgctttgttgactttggtggctcaagggacaagccaggcactggctcatcttttcctgcctgattctctgggcagatttctccatagggtctgcagggaagtgggggaaagctgggtatggtcagagtggaggtcactatgtgggcttctcagtcctcatgctggtctgtgtcaggtgcctttaattcagggcctaaggaaccattgctttttagcctaagcagcaatttaataatttagcaatcaggtaatactggcactttgttctcccctggctgttttctcaagctaagttctgtgttagcatttcttgatttctcccctgatactaatcctcctgggagattggccttacctattcacgtggagcgtggcttctctaggaatgtgggaattgctccatggcaatggtgctttggccttcactgcccacatcactgggaccatcccagcccttcttgtctctagccttttttacaggtcaagtccaaacaggaggatctgactctcttcttggtcttttctcctgtctagctgtcttgttttagagcagaaattaaaggagcagggtgtcctaatgaaactgttactgtgatcatatcagctctctagaacaaattcagaaagacggccctttgtaacaggcagactgggtgggcaggcgttcgtttgtaaagagatggctttcctctcccaacaagcagggccaggcatcaccccatgctgcattgatgcagggagtgaattgagaagtgtgggaacgtcatttggactctttccattgctcccattttaatgctttctaaaggaactgtttctcaggtttaaataaagtggcaacactggcttactagaacttatttatttttatttatttatttttgaggcggagtctcgctgtatcacccaggcttactagaatttagaaccactccttcatttgtgtgtatccattctgtctttccagtccccaatgtatgatgtagaatctcaccttcttgcagcagaaccagtgccctaagttattggatgtctttgttgtgaagaacttggttccagcactttccatgctaccagcccaggagtaggtcgtgttctgtcctcaaacattggagtcttgggtagactgcaggcctgatgacaggcattgctcgtctccctatgagaggccttttccttcctttgcccacagagcattgtggacacaccagctgcctgcctggaagaaggagctccttcctaccagcctgtggagtctcatttctgctggaaaggcataagaatgctgcagacttgacctcgggaccctaccacgctttccaagtgaccttagagattaaagatctttgattttacagaagaaaaacagcataaacactcagtcttgtgggggtagttattgcctttcctactaaaagtagcattacctgggaaagctggccttgtctccaactgggcacatccttgaaggaccaagagggtcttctaagaaaaccatcaatgtttctgttccagtatttcctcgataaagacatttgccaaccagtgatccaagctatccctcagctgctcagaatttacctcaattcctttgctgagcaggcatgttgtatttctatgtaatggggcatatttgcctttggagaaaattctgaggactgtaatcattttagccattgatagctgatggtcagttctgcaggtgcctctccccatatcacattaagactcctttttatatatagtttgaagtttaaggatccataaggatgaattggaatcttcttcttaagaggtatgggcttaagaaagttgaactgtaaaaggatcagtttcattctattcagcccagcgtgtaagcctagtgactgtgtgttcattcacattttcatcaggcagctctggccagaggccctgaaagggttgagtatggtggaagattccatcgttttcaatgacagtactgctcataagttctagtggttctgaaaagaataggtttaaaagtgaggtataagattatgtatgatgttgatgttatgtgtgaggttgatgtttacctttyttggttgacaaatctggtattggtcctctgacaagaatggaaactgtatgtttggacaaaaawactgaagatacagatactgaagttcacaagtatcatgatgtgagaggatagatcattttcatttcaaggacttggttcatggaaaaaccttttttttttttattcctttgagacagttttcctcttgtcacccaggctggagtgcaatgtcatgatctcagctcactgcaacctctaccttctgggttcaagtgattctcttgcctcagcctccctagtagctgggattacaggtgtgtgccaccatgcttggctaatttttgtatttttagtagagatggggtaacttaagaagttaccatgttggccaggctggttttgaactcctgacctcatgtgatccacccgccttggcctcccaaagtgctgggattacaggcctgagccactgcgcctggtcaggaaaagactttttaatgccactagattcctctcctgatgcattcaggcctgtggcatcctctagttcagtttcttgggtagttggtattacagatttagagtcttgttttgatggacatttctccatacagagtaccgtaatgctgttgcattttctttcagatttgttcagaatctcctgggggtttctctcattcagaatcaggtactaccggggcatcttggaatacccccaccctgccgtcctgctgcatgtccctgctcctttgactccattgtagttcacgtgcttgtttgttgcttattcatgccagatttctaatataaatggaatttagtaaggttattctaatacaaatacagatggtgacagttttgttttcttctttgctctgctagagtcaccaggtttgatcaacacttggagtttttttwaatatattgatttggtcctggataaagaggtgccagattaagaaaagctccttaagaagcaatttattccttagccaggggcttggcctgtttggtgtagcagagtgaccagattcattctggtcttwcaggtgctatcttgaccgctttcatttttataaataagggattcatcttccctggcctcaggatcgtcataacagctgctttgcaagaaattcgatggaattggttctttccttctgccttggaaactgctatgtatttttcatttttatttttttgagagtctcactctgtcaccccagctggagcgcagtggcacaatctcagcttactgcaacttccgtctcccgggttcaagtgattctcttgcctcagcctcctgagtagagtagctgggattacaggtgtgcactaccacacccagctaattattgtatttttagtagagatgggattttaccatgttggccaggttggtcgtgaactcttgaccttaggtgatccacctgcctcagcctcccaaagtgctggggtttacaggcgtgagccaccacgcccacccagaaattgctgtttatacatggtgggctgtgtgtggagaaaagtagggaccactgctgttgtaaaccttctcaacaaatatgaggcctgagagagaaccgcattccatcctttctggtcctctaaatacactgatacttgacctgccctttttcctttccttttcttttttttttttttttaaatattttatgttattttattattttagagacgggggggtggtctcactatgttgtccaggctgatctcgaactcctggtcccatgcagtcctcccacctcagcctgcctgggactacaagcatgtgccacaatggacgctcctttgctttctgtgcgggagcgtttagatctgaggagcgctgtggctggtcccttgaggtgagctgttctcatccattatatgcagctttttctactttggctttcagtagctttgcttgcaaggagcactctaagaataacacaataaatgttagacccaaggattatttccccaaacctgctggcccaacactgttgcagtcagcaggaactaaggagaataacagagtagccaaggcctctcaaaagaatgagataaattgttaaagatgggacaactactctagaccagaaatgactgccatagtggggatcagttaaagaggaatcatagccctactggacaacagggctcccaggacttgggcagaaagtaagtagcaaacctcatcacgctgctttggaaaagggatttgggttgagtttggtaacctgatgacagactaggtggagggtagatggcagtgggtgttggtactcatcttgctctgctggttggactcaggagagttgttccacatcctcgtggttcctttccgtttgtcctttaaataaatcggtctcatcccccaggagatgcgctgggctttctgtgtgccttagttgagagtgtttgaccaccttgtgttttccttggactgttgatgagctgctgccaaatgttacccttccaaggggctgctacccgccaggcttttcatacttgaatataaacaactagatactggccttgatccccagctgtgtgagcatctgggagcagtgaaggaagcctcagaatgtgtcaggcctgcctgctctaggaagagccagaggaactgccaaccatccggactgttttgagagtaggtgtcaggactttgcagctaccctttgcccttgtaggcttggccccagatatcttggattttcttttttcttttcttttcttttcctttccttccttctttccttctttctttctttttttttttttttcttttttttttttttttgtggagaaagagtctcactctgtcccccaggctggagtgcaatggcgcaattttggctcactgcaacctccacctcctccgttcaagcgattctcctgcctcagcctcccaagtagctgggactacaggcatgcaccaccacgcctggctaagttttgtattttttgtagagacagggtttcaccatgttagccaggctggatatcttggattttcaaaaagaacagcataatgaattcagataaagcatgagaaatctcagatgcagtgggggtatcagagaaaactacccatcttcttacttttgtttgtgacgaaatggctcagatctcgtaggaaccggtttttcagccatcaaaaagactcccatctatctcttgaagtttgttctcaggtcttatctgatccttccatttctgaatgtgagcagagaagtgtttggagccaaaagttcgaagtttttactctacctgtaatgtttggaaattgtataaatcaatttaaacatggactaaaggtcttaggctgatggatttgaccgctcctttctctccttcaggccggctttgtttcatttgacccttgaagttacattctttatgttccttcatctcatttctctcttcactcctttacaaagtctaggggatcagacagacaatttgactaggattttatgactagacctcgtttgattatttggtacagcccaggatattaggagcttctctcagttgtagaaacccaggagcacttggacttgccgttacaaaccaaggtgaagtgacagttttcttttcttttttttttgaggcgagtctcactctcttgcccaggctggagtgcagtgacacgatctcggctcactgcaacctccgcctcacaggttcaagtgattctcctgcctcagcctcccgagtagctggaactacaggcgcgcatcaccacacctggctaatttttgtatttttagtagagacagggtttcaccatattgaccaagctggtctcaaactcctgacgttgtgatccgcccatcttgcctcccaaagtgctgggattacaggcatgagccattgcacccggccgacagttttctaagttagggtagtcccaccttgcctgtggcaggagcagggaaatatatcctatctctacatttgagcacaatgaccatgaaatccaccctagcataccagactcagaaaatcttttttttttttttttttttttgagacagtttcattctgtcgcccaggcttggagtgcagtggtgtgatctcggctcactgcaacctccgcctcccaggttcaagcgattctcctgcctccctcccaagtagctggtattacaggcacacaccaccctgccttgctaatttttgtatttttagtagagatggggttttgccatgttggccaggctggtcttgagctccttgacctcaagtgatccacttgcctcggcctcccaaagtgctgagattacaggcgtgagccaccgcgcccggccagaaacttggattttaatcttggccgcagctttgattttgatggtagaattccaaggtcatctctatttctcccctgtactatgagggtactggagttttgtaacttcgtgaggaggaggaggctaagaaaatagggaaggaagttctcaagaaggctgtgcagtggtgactccccttcaggggacactaacgaattcagatcctaatatgaagctctgattaaaaaaaatagtaatacattttttgtgggtacatagtaggtatgcatttttatggggtacatgagatgttttgatacaggcattcagtgtgaaataataagcaggtcatgaagaatggggtatccatcccctcaagcatttatcctttgagttacacacgaaacaattacactctttattttaaaatatgcaattaagttattaactggctatagtcaccctattgtgctatcaaatagtaggtcttattcattttttctattattttgcacccattaaccatccccacctccccccacacccccagtacccttcccaacctctggtaaccatccttctaccctctgtgtccatgaattcaattgttttggtttttagatccccaccaataagtgagaacatatgatgtttatctttcttttcctggcttatttcacttaacataatgatctccggttccattcatgttgttgcagattactggatctcactcttttttatgggtgaatcgtacttcatagtgtatatgtaccacgttttctttaaacattcatctgttgatggacagctctgatatttttgccagcagttttgtgatttgattttgcatgtgtgtgtgatggcaaagttacctagggaagaagacataaaaagtatgggacttctcaattgatccctacaccacagtatgactttcactcctttaggtttcttaacacaacgagtcgtcttgtcagcagcttggtttaaagtgctaatttgaggaaccaggtgctttgcgtcagcttctgacctggctgagaccttttactgacaattggcccaagtgtagtagaactgggagaggttccctttcccaagagcctgctgccgagacagtagaagatggtggtttatattgtatttcccttaaggtaatctgtgagagaagcttaaaattaggttacacttttgacttgacacaagtgtcaatgaaaaaatattcatgttctcgttgttatgctacgagatctaagccaagtgagaaatctaagcaaatggttgttcagtcacttcagaagaatcgagacaacttacagaacttgctttgacagagctgttccagctcatttgtaataacatgcttagaaccttctgcgttcaagagcatgtcagaagggaatgcctggtcgttgtctccctgggaagcagcgtggagcacagccccgggagacgaaggcagcagaggcccgtgaccatcaagcaccagcctctcaaggcatctctgaaggcagctgagaagtttccatcgacagtggctcatggccagtgcactgaccttttgctaaagttggcagttgctgaagtgaaatgaattctttatcggaaagagtcaattaaaagagctaagtcaaagagagtgcaaatatggactgtgtctttacctttccacagcagctttggccgcatgcccccgagctccctttgtcatctatgtgtgtagcaggatcacccgggaggagcagggacgcccccttatcaggcttctcttggccgcctgcggcaagatgactgttcctgcggtcctcagtctttcatgactttgtgagagcctctgtacgtcaagccactgtgggtaatggaggctcatatggggtggggctggtgcttgctaggagaggcgtccggagggcctggccgtatgacacacacaggaggaacgaggaggaatcttctaagttacaggctgtgtgtgaatagcaagtacccccttgccttttctaatgcagacttttttaaactgaggtgtcagttctgacaatattatagaacatttaccacgtgggaggcctggggcttcccagctccttttgctcacctggagatagtgccccctttcttcagggtggaagaacacagggttcttccagaacttccccttgaggggacctgtggtaggaaagaaacatgacaataatctctaacttttcagaggctttataatgggagggaaacttagaggcataagcctcactttacgagtgaaaaacaggagacaaagctaaaatttttgcagagtcatgcgagtggttagggacaggcctggatgagaacgtacctgttgtcagctccccacatagccccgcttccccagcgccacgccagcagcaagctgggcgctcacagccggactctggaaagccccaggtcattcctcctaccctgatctgcagggagtgccttcagggaggcccgagcagaccctctagcctccctgtggggtgtgcacattcctggaggtgagggtttaattccagcctagatttggggtgggcatcaccagccaggccccacctgctttactttatctcccttcatctctgatgtctcccacctccatcctgcttggcatccagggtgctgcattcagtgtttgccgtggataggtgtgcatggcatttagctttggaaaaatatatggtggtatttcgttggcatgtttttaattttagcctaaagaccttgatctactcttaaaagtatttgaattaataaatcaaggaagacactgcgggtagtttctagagtgaatgatgaatttgtgaagttactgtgtgaactctgaaattcagtggctgtcaaaagaggtgaatgcttgcgagcaccttgcagacctgcccccgccaccaagctctgtgagtggaagactcaatcagagaaggagtgagaggagggaaaactccaggcacagtgcagtcgctgcctttgttcagcaatgaggaggggaaaagtggccttttgggttggctgtgacctccctgtgtgtatctgcccccctcatgctaggtggcactagagaagtgttggagaatatggagccagtctcctggcttaggatttttgttaaaatacggggctccattcttgatatttcttttctttttaaagagacagggttttggccgggtgcagtggctcacgcctgtaaatcccagcactttgggaggctgaggcaggcggatcacttgagctcaggagtttgagaccagcctggggaacatggtgaaaccccatctctaccaaaaatacaaaaaaaacagccaggggtggtggtgtgcacctgtagtcccagctacttgagaggctgagttgggaggatcagttgagcccgggaggtggaggttgcggtgagccaagatttgtgccactgcattccaacctgggtgacagagtgagaccccatctcaaaataataataataattaaataaacaagaaaactcctgaggtcaagcattcaagaccagcctggccaacatggtgaaacactatctctactaaaaatacaaaaattagccaggcgtggtagcagatgcctgtaatcccagctactcaggaggctgaggcaggagaattgtttgagcccggggtgcagaggttgcagtgagccaagatcgtgccattgcactccagcctgggtgacagagtgagactcagtctccgagggraaaaaaaaaaaaaagcgtgcttagagcagaggttcatgggattaaatgcaacaatgtaaataaatctcccagaacctgcctggcacgtaggagtggctctagaaatgtgggctgccgctgtggttttttcttcctcctactcacttgccccactccatgaaagagctaaatgagcaacggactcagagctgctttggagaatggagaccttttcaggctgttcctggcccttcttctaatacttggcaccctgtgtgtcttgtatcaaggaaagccagagagagcttttcggaagaaccgactgctgggccctgccacagctcaccctcctgctccctcagcagtgcatgtgccgtcctttgcccctcacagggcccagcaaactggcaggtgcatggggttgcaaacctggtcctgcaggaatgtagaatgggtgtatctcaccccacttcacgtgagagataggccgtgttcctgtgacccttgctcagcaactcgtgtgctttcaaataaggaaaaaagggaatgtgttttcatgcaacgagaaattataccaatcccattgccttggcaattatagtattacaagtgatagcaggcagccagagctgaagacgaggaaaagcaaaaatgataagaaagcctgggggaggctgttcacttcttactctagtacaatcacccaaccccgaggtgcctgcggctgaggctcctgcactggggtttgcagggctggatgtgttagcacctccctgagacgggggtgccttagactactgccgcacggcaactcctcaactcctccagggttttgttgttttgttctggccagagccacgctctggccgtttgttacttacacctttgtagtagcagtgccaactattgtgacgtttagctgagatccagggataattagggtagggattaaggtgtggggcgacttgtttttaattaattataaaagtaatttgagttcgtcatcacaaaatgaaacaatatagaaagcttaaagttaaaggtcttatcccttcttctgccctggtctccctgctcttgggtgaccaggcagcccttgtaaagcatgggtgtgtacactcagaaatgtatccttccttatgcttatgcaagcatgaatgggttttgtttgctaagggtgtcacattcttcgtgtctataacttgcttttttttccccttcaatttgtggacaagtcagtatatcgaagttttacccttttcagggctagtggtagcccctcctgtggacactccaccaattattagccagatcacgattaaccttagagacaagaggactgttagaaagtcctgtatgtggaagccgctgctgctcctctctcaggtgactttttccaagtcctgcacctgttgggagggctcctctggagagcaggagtgtatggacttggccaagcacctaggaagggaaggtaggagtgagatgccaaaccacagggtcagaaggcatctttgcagctaggctccaaactcgtttcccattcaattccagaagttcaagggtagagacaagagtttggaggctcgctctttgaagaaactgaatactacataaaaaagactaaacagatactaatgtttaatcacaaatgaaaaagccccctggtacctctgttacaaaaactccaaataaagtatcagataactggcctaatagtgtattgaggacatatatcacaaatactgttttcccccaaaatacaagactggttcaacatcagagaccctgttacatcagtagaccaaaggaggggaagacatgattatctcatttgatacggaaaacaaattcgatgagttcagtaccattttatgtttaacattctcaataaaatattgatgaagggatatttaatttgatttttaaatcctgtaccaaaaatctacagcaaacattatattcaatggaagatttttttgagacagttttgctcggtcacctaggctgcagtgcagtggcgcgatgtcaggttaccgcaacctccactttccgggttcaagcaattctcctgtctcagcctcctgagtagttgggattacaggcatgcgccaccatgcccggctaattttttgtatttttagtagagatggggtttcaccatgttgaccaggctggtctcgaactcccaacctcaggtgatccgcccaccttggcctcccaaagtgctaggattacagatgtgagccaccacccctagcctagatctagtattataaaatgataatcttcctttctcgttgacttagaaattcagggctatttcagtaactgtggggtaacaaattaccccaaaacttaatagcttaaaacagtaataatcattatctctcacagtttttgtgaaccaagcatttgagagcagctctgccaagcgtttttggcttttgaagcctctcttgaggttgcagtcagatggtggctgtggctgcgaccatctcaaaggcttttcactcacatacctgttgcctggtctgggaagactcaagcagtttggggctgggacagctgcagttctccgtcatctgtttatgtgtacattttccatgtgatctctccaatgtggtgccttctgggttactgcactaagtataggttgactcagggctcccacagcgcttgtcccaaaagagaaccaagtagaagccattttgcctttctgactgccccttggaagtcacacagcatctgccacattccgttggttgaggcaggtgggaaggtcactctaggtacaagagaacatagaccccatgtctcgatagaggagtgttaatatcactttgtaagaaggtcatgtgggatgagatatatattggtgctatctttggaaaatacagtctgctacaagtaaaacccgttcagaattctaattggattttttgaagaaatcttatttttaaatgcatttggattacctaagttaaacttcagaaagaagagaaaagggaacttttaagcttctaagccatagtactaaaagcaaatgatgtctgcgcaaaaacaggtaatagacaaatgaaatagaataatgatctcagagaaagacccatatacatacrggaatttaatatacgataaaggggcaccatgaatcaatgggagaaggatggattgcttaatagataatgttaggagaattgactaattaaaatggagaaacattaactggatctgcacagactatcatacacaatggtagactctagaagggctaaagacctaaatgagaatggtaacaccacaaaattaatacgtctcttatctacaaatctgaaatccagaacactstgaaaattaaatgctttttcttaacccacatggcagcaaaacttgagctgaggtgaagctatttataatcatgtatttatcctgcttaatgtgaatatcctataattcactgcagttttaaaaaactattattataaaaactttcaaacattcagaaaaatttaaaaatagtattagagggccaggcatggtggctcatgcctgtartccaagcatttggggaggcttaggtgggagtatcacttgaggccaggaattcaagaccaacctggtgaaaaagagcgagaccttgtcttaaaaaaaaaaaaaaaaaaaaaaaaattagctgggcatgattgcatgcacctgtagtctcagctactccagagactgagatgggaggattgcttaagccctggaggtcgaagctgcagtgaactgtgatcacaccactgtactccatcctggttgacagagcaagaccctgtctcaaaaaaatcatgaaccagttaaccctggcctggccagggtctcagtttgcggggggcacaagcagtggagcagctgtgctgctgtggccaatccctttctcccacagcagagtcgggagtggcactctgatccatatctactgctcctttttcacggattgtctacttgattggttttgcctattaaagccaaattcaaatatttgtccaaaaagctacagacccagtgatcctgctatatagcaggacctttggaggaagactaccccaggtgtgtgtgagggcctccgagaccagctgctgcagtggatgagcagggctggggctggccctggggtctagcatctgtgcaacaagctcctcaccacttctgcagccacgcaggtccaccacctctaaggcacaaagtgaaatcgccctgatccatgcttaaaatttggccctggtagccaaggcccgagaacacacttcccttttcacccaacatctattcccttacttgtctgagtctttttttttttctccctcttctgtgaaatgggccagaagttcctcactcagttattttgggagcattaaaaaattcgagggtcccaccccctcctccctctcttcattcagaaaatggatggaatcaagctgatgcccgaagaacaccaaagggacccaagaaagtcagaaaaatggtactttctgctgctctttagccaaaggggtgaacagcgttaattggctcatcgttttaaagatctgagttgttcaaccaaagttaggagataatctttcagtggcactattgccttttcagaaaagaaaaaaaaaaggaaggcaagaagagttgctttgcacatagacatctccagtatgggaacatcatttgtttggcaggggggttattttttcctcttaccctgctgtaaatattcttcactgctctcttatatttcctgtatccaccatctttgcccaggtgtttaactctgttcccttaaatggtttcccctcaggcttagtcttggatctttgtacattctcctggagtgggcttatctgggcttttgtttttttgagacagagtcttgctctattgcccaggctggagtacagtggcgcgatctcggctcactgcaacctccacctcctgggttcaagcaattcttctgccttagcctctcgagtagctggaactacaggtgggtgcccccatgcccagctaatttttgtatttttagtagagatggggttttgccatattgtccaggctggtctcaaactcctgacctcgtgatccacccgcctcggcctcccaaagtgctgggattacaggcgtgagccattgtgcatggcctcatctggactttttaaaactgtttgtaccctaatccatatctccagtccagatcttccccctgggcctcggcccctcacaccagataaaccagctatctccacttacatgtttctcacattcctagaacttggtatgccccaaactgtatcatcatcttcacccctgccccctttctagcagcccattccccttgtagagttcatgtctccacaaaaaccaccatttacccagttgcccaagcgagctgcttgagtatcattaacttctacacccctaaatctctgacttctaagctaataacatgtccaagagagtaaaccctttaaaaatccttttaatccatacactttctgccagagccaggcagaaaatataaggggatgccaaaaaaactcagtaatcaagacaaataattgttcagagtcgggttgaccagatgtcccttctggattctaagtccagcagatggcccattgggcagccagcccactggccccaggagcatagggaccttcaygtttggcagggcagcagggccgcctagcccaggccggcctctccattcacaccaccgatagcctgaatgactgcagtaactccccactgctctgcaagcttttcgactcctcccaatccatttactgcaccatggccaaagtaatatttctgaaatataagccacctctgaactgttcaacagttctgcagtgtttctggaatgatgcacctaaaccctcaatggaccttgcccccgatcctgctttcctctttagcatccacatccacatttttttgcaactctgtcagcattttttaaaaggaaacctatttattgcagtttactctccatacaaaggagtgcttatattacatcataagcatacatcctgatgcattcacaaactaagtacctctgtgtactgacatcctaggaaccctcccccaaccccgcccaccataccccttcccagttgcagctcccatggaggtactgctttcctgacttgtaacagcgtggacttgccttgcctgttttgtatcttaagtagatcggatcagatagtgatcctcgtgcactcatgtgtctgcttccttcattcacatcatgtgtgggagccgcccatcttgttgtgtagggttgtagagttttcgtcaccttgctataatagttttccattatgtgaataaactatgctttatccatttgttctcatactggtgctgcataacaaaatacccccaaactcgatcacctacaacaactatttattatgcccatggactatgtgggtcaggtattgtatttgcatagggcacagcagaagcagctagtctatgatgtctgggacctcagctgaaaactagaaggtcaggcacaggtgtctttttttttttttttcttttgagactgagtcttgctctgtcacgcaggctggagtgcagtggtgcaatcttggctcactgcaacctccgcctcccgggttcaagtgattcttctgcctcagcctccgaagtagctgggattacagccacccaccaccacacctggctaatttttgtatttttagtagagacagggtttcgccatgttggcctggctggtctcgaactcctgacctcaagcgatctgcccaccttggcctcccaattacgggtgtgaaccaccgtacctggccacaggtaccttttgatggctcattccctcacgtgtctggttctccacagagacctcagcaagggccgtcaatccaaatgctgatggtggcctctctatgtggcctgggcttcctcacagcatggtggcaagcttccaagggtgagggtcttgaaataggcagtggctgcatcttttgtgtgacttagccttacaagtcatagcattttggccgtactctgggtcagaacagtcccaggcccacacaggttcaagggcagggaaaacagactccagtgcttgatgaagggtggcaagattctggaagtgcatgtgggacggaaatagtcctggggctgtttggggaaaatacaatctactatacccatgagctgctgataggtgtctacctttctgatccaaccacatcattattcttccagttctttgaaacaataatctccctgtcaccccggggcctttgcacatgatgccccctcgacctgcaactctttccttttcacccctgactcctgcacctagggtaccccttgtctgcctggctagcttttgcttatcttttattttttattatttttgagataaggtctttccagctggagtgcagtggcatgatcatggcttacttcagcctcaacctcctgagctcaatcagtcctcccacttcagcctcccgaatagctgggactacaaagtgcatgccgccacgcccagttaattttttttttttaattatcagatacatggtatgcagtcagattttttgtagaaatgggtttcactgtgttgccctggctggtctcgaacccctggactcaagcagtcctcctgcctcagcctcccaaagtgctgggattacaggtatgagccaccatgcctggcctgcttatcttttagtctcagcctaagctttccttcttaaaagaatgctttcctcacatcactgtcaccccaacccactggccccaaaatggcagtgcaggccccactcctagttacttttgggaccttgccttgtccctgtcgtaatgctgatcacaaggtagtgctctggcttgtttacttgtctggatccctcatcagagtttaagcttcaggaaggagcttaaactgccccttgtactgttcagtgtccagtccagtgcctgacacagagtaacctgcagttaattggagaaagtggattcagccttcagtgtccacccactagagacagtaacgtatgcacaaaattaagcattaacacagtttagaacataggattagctatgttgtagtatacacaaacacatacacacttgtgcaagtgtcaagtgttagagcaggaagcaattttaggtgtagattgtcccattgaacccctccttttgcaagtaagaaatgtaaacagagctgtgacatggctcacccaattggaagcaggtggccctgtgaccagcaatcccaggccctcactgtgagggaggcattacaatgaaggcctccatttgagcccctccagcttcccctctgagatgcagatactgtgttggtgtagtgatgggccccagtgctactgttcatcacactcaaccggttatctagttagtgaaagaaagcatttaaaaaattgaggggccaggcaggtacagtagctcacgcctgtaatcccatactttgggaggccaaggtgggaggaatgcttgagcccaagagttggagaccaacctgggtaacatagtgagaccccatctctctctctctctctctctctctctctctcbctctgtctctctgtctatatatatgtatatatatatacacacatagatatgtatacgtatctatatacatagatttatatacataaatataaaattgaggcaagattttttttttcacaattgttgattgcttgctagtttttattaatagctgttgtttttcctttctttttagacctccctccagtgcatggtgttgagttaatgctattacatgtttgacacactattgctggtctcactggtcttggccaggctgctgtcttggttttattcattcatacattgatctgttttttaattcctgttgtccattccccaccccgccgtagccaaccatgtcaatatgtttggtgtattggtttaatttttcatttctgtgcatacatgggttttgttaatctaaggttttagttgtgtgcatgtgtttttaacttaggtaaaatggcacaaatggcctggtgctacggattcttttgtttctttttttctctcagcactgtttttggatctgtccgacgtgcacatttaatccattgcttgtggctgctgcatagtattcatcatgtacatgctctgcggggaccttgcccgttcccctggggatcatctgctacccgacatggttctgtggccaacatcctcgtgctgtattctgattgacctgtgtgaggatttcgctaggaaatatacccagaaatagggttgccggatcatagactagggaactttccggttcacttctgaggactcagaaaacatgattatgtcccttttctcttgctattttctcgtaaatgtcaggaaggtaggttgcttaaaataccctaactttcagcctggctctagaatcttgcagtgctaccacccggagagcagagataaagattgggattttattctctgtgggtcagtttgaggtttgcattttttcacttggaatgattgaaactcgtgctgctccttccgcgtgcatgtgtaaaacgagccacagactgctagtctgttctgctctcctgctgtccgtgascgttgctagacctcctgtatggaggcagtgtggtgccatggaaggaggcgatgcagtagagtcaggccggcataagtggcttctctgcatgtgtgtcagccccatccctaagctggggtcatgccacccggtgaggctccatatgccagcatgtagcacagagcctactgggtgacccttccaacagccccttgagaggagagggcacartgctgcataagttggtgtctaaagggtgtggagttgtatttaagcctttactatcacattgtgaatatttatgggtggatttatttcgtgtctggaattttcttcaaaataatctggtgcagggagagtgagttgggataaagatcagatgaccatataatttatcattcaatcccaggcaagtttgaaactgaaagagggagctattaattacaccaagacgacacgcttgaactggggttgttgcagcaaaccaagacatggacacctcaggggaaaatcagataggactgaccctgatttgatcattgttgaagctgggtgatgagtacctgggagctcactctattcaatttttttgtttgtctgaaaatttccataataaagttttttttaggcccagtgcagtggctcatgcctataatcccagctctttaggaggcctgggcaggaggatcacttgaagccaggacttggaggccagcctgggcaacataacaaggccctgtctctataaaaagtaataataataaaatattgaataaatgtattaaggaaatgtttgtatcagagtgcagaagcacccaaaagttcgcactgtccaggaaatggctrttgagtactttgccaacccctgcctggggtcataagcccaggtcaccatgctgtctgcttttcccccctatctctgggcacttccaggtgggggtgggtgggagggagtaaatggagaggctcctcctactcttcattgttggtgggaggaatgagaacctggaggctgtcctagctgtctgtgacttgatttagcatagggggaaagggctgacctttttyctgccagcagtactgtcaaggcctgcccaggtggcagccgaagtagctcccttcatgcccactgcacaccacagcatggtggcaggggcgcctgcagtctgtgcacatgcacacatgatcgttctctgcaccccttatcggaactgcgggttgggcaggaagcagcatgaccgcagtgggttcctaaccgacattctgtctcacacacgcttcactgtcctacttaaccctcgctgtggtatggcagttactggaaccttgactggtagaaggtagcctctgctgggaatggactcagacagcaggctgactgcccttaatttgttatctctttccggttgtacagctgggcctttttcacacatttccgtgaagtgtgatgttcattcatccaacagataytttcaagagcccatcatatgccaggctctagggctacagcagtaaaataaacagactctgccttcaaggggcttatactgtaagggggccacagacagcaggtgcagcaaaggtggaggaggagggtcacctttctcacatggctgctgagtgctcaggaatcgatgttaggatgctgtcatgtggagatcattggcaaccgtggaaaggatggttttagagattggagcaggttcaagaggaactgggagaggaagtgaagatggccattggagatgcttcattggaactggggcagttgctgcaggtgtaggtgggattgagagagcgttgtgtgaggtagagaatagcttacatatgtggactcaggagagaggaaaaatatgcttaacagaacttgttctgaatggcccttttgtatgccatagcaaatatcaaacaaccctgatcatgagatatagagccctggagggcctgattcagttttcttcttccttcagagtcccatcttctccatactaaaagtaaatcacaaatatttggattgttattgacatatctattatatgttttaatcttctatctataatctttctcttgttatataaatggttctgaacttttgggttctaagcccaaacacttttgacatctaactctatgaatctcccttagaatgtggcatcttatttcaggaggctgatggatccgctgatgtccatccccataggtttcaggtcaagagcctgtgtgtgggacacattcgctagacagccacttcgggatgtgaaagaaatgagagctctgtggcctcctcttttcttctcttccctaatgggtcatcccttcactgaggggagaaattatatttgttttgccattttccttacaacttaataactagaatacatatgaatggatagacagactgactgacttgattgcttatcctatttaagtgtggcacattcagtccatagcacatggcatcctctcttggggcacagttttcaatggtttcccaagagaggatgccatgtgctacggactgaatgtgttttatccccctcctcccccaaaattcatgtgttgaagcctaatccctaatgtgatggtatttgaaggaggacttttgggagataagtgagtttagaagaggtcgtgagtgtggtgcctttatgatggaattattagtgcccccagaagaagaagagacaccagcgctttctctccagcatgtgagacacagcaagatggtggacctttgcaaatcagggagaggccctcaccacacatcagacctggcagcaccttgatcttgggcttctcaacctccagagccatgagagataaatgtttattgtttaagccgtccagtctgcagtattttgttacagcagctcaaactgactaagatatcctgcttcataattttcagcagagccagggaaccccagctactctcctttaagagttgatccaggcygggcatggtggctcgtgcctgtaatctcagcactttgggaggccaaggtgggcggaccacgaggtcaggagatcgagaccgtcctggccaacatggtgaaaccccatctgtactgaaaatacaaaaaattagctggggctgggcgcggtggctcacgcctgtaatcccatcactttgggaggctgaggcaggcggatcacctgaggtcgggagtttgagaccagcctgaccaacatgtacaaaccccgtctctactaaaaatacaaaattagccaggcgtggtggtgtatgcctgtagtcccagctattcgggaggccgaggcaggagaattgctcgaacctgggagacagaggttgcggtgagccaagaccgcaccactgcactccagcctggcgacagagcgagattccgtctcaaaaaaacaaacaaaaaaagagttgattttttagaagaacagccatttctcttagaaggttttacattcatttcctgttgttgctgtagcaaatatccacaaatttgacaacacaaatgtattttcttgcatttttggagatgagaaatctgcattggtctcgctgggctgaaatcaaggtgtctgcagtgctgtgctgcttctggaggctctaggggagaatccatttccttgtctttcccagctcctggaggccasgctttccttgrctcatggtcccttcctctaacttcaaagctaatggcaaagcatcttcaaatctctgtctgtctgcttccatagtcatgtcttcttctctgcctctctctttccataataaagatgctgtgattacatcggacccacctgaataaggttctgtattcatcacatctgccaagtgcttttcgccatgtaaggtaaacattcacaggttctggggattcggaggtggacatgtttggggagccattattctgcctaccacacctttatacaactggttgcacacatgttcccatgtaatggctagggtggtaacatgatttctgttttacagttgagaaaatggaagttcacggaggttcaggaaattgcccttggtcacataacttgtgcgtggagaagtcagcacttgaatgctgtagctctgagcccagatctctgtttttccattatatctggctgcttgtttttttaattctcttccatacatttctttctttccttttttttttttttttttttttgacagagtctcgctctgttgcccaggctggagtgcaatggcgcaatctctgcttactgcaacctccgccccccaggttcaagtgattctcctgcctcagcctcccgaatagctgggattacaagcacacatcaccatgcccggctaacttttgtatttttagtagagatggggtttcaccacgttggtcaggctggtctcgaactcccaacctcatgtgatccaccagcctctgcctcccaaagtgctgggattacaggcgtgagccaccacgcctggccacacatttcaataagtggtatttgtcaatatttatgtttctgatgccaatattctgggaagttgaagtgctgacttgagagaatgttacaatcaatgtaaagttagtcttcaaggtgaaaagtcaaaatgaagaaggaattgcccatttatgtggtcctcttctttcataaacatttgtttgtgaggaccaatacagatattgcttcctggcttaacatttctgtccactgacatatacttggttttaatgttatgtcatatcacacatcttttgcttgctagccagatttcttgttatccttaggagatccttaactttcttaaccttggaactgttattatgaatcaagatttacaaggtatgtccatgttcctgctaccatgttggagcctcctccatgccttactcccaaccttctccttctcccattcttatctacccggttcaagtaacctgaaccagaggcaaagaaaagcaatatggtagcatactttacatgccttgagtagaagtcattcactattttagggagcttagaattcatggtccttctcgttcgtgctttctgtctggagagtctctagaaaactgcttttgggggccgggcgcggtggctcatgcctgtaatcccaactctttggtaggctgaggcgggcggatcacaaggtcaaaagatcaagaccatcctggccaacatggtgaaaccccgtctctactaaaaatacaaaaattcgctgggcatggtggcacacgcctatagtcccagctactcgggaggctgaggcaagagaatcacttgaaccagggaagcagaggttgcggggagccgagatcatgtcactgcactccagcctggcaacagagcaagagtccgtctcaaaaacaaaaacaagaaacctccttttgacccatcggtcaggccctcacagctgtctagagtctttgcatgtctttctctgtggtcaccatagccctgggtgagagaaaagcaaggactgaagtatgaaggccttctctcacccttatccttcccttggataggattgatcactgcactgctgtttaccttttggaacaactccattctactcttttggcttcttcctcttagatgccatttcaaaacacagttgtggcctactggactgtgccctctgggttccagcctccatctacctgtgttggaggtgcagctgaacagaggatgccctgatgacagggtascaggactgggtccaaggcaggaaggtagcctgtagtgtagctgcgtgccaggaccccagcctgagttgatggtgtttttgttttttgttttttgttttttctgttttttgagacggagtctcactctgccgctcaggctggagtgcagtggcgcgagcttggctcgctgcaacctccacctcccgggttcaagcgattctcctgcttcagcctcccaagtagctgggattataggcacccgccaccatgcctggctaatttttgtatacttagtagagatggggtttcactatgttggcaaagctggtctcgaactcctgacctgaggtgatctgcccaccttggcctcccaaagtgctgggattataggcatgagccaccgtgcctggctgagctgatggttttgatgaaatgaatacagcagcacacattctgcatcccaggattatgctgggagccgtggaaggagccttctcacagacctccagtgacagaaaggctgggctgttggcatcaactgatgtaagttatacagtgcaaggcaaatggttttattccatatgagcagtcacttacatgtgagtgtctgttcgctggtgagtcagatgctgtgctgaacatgatctaatagtatgttcaggcattttctttcttgctggcaaaaaattcctatcagccagtagggtggacagtagggtagacagtgcctttaggagcccagaaatcaactattggtcctgtatagattctctgtgaaagtttccttcrttgtccttttcccttccctaactgtttttccccttttcccctccaaacacctcccccaaccccacacacactccataaaaaagggaagttagttggaggttggaatttctaattacatcaataaagactccagctgggcatggtggcgcactggcctgtaagtcccagctacttgaggggctgaggtaggaggattgcttgagcctgggaggtggaggttgcaatgagccaagatcccactactgcactccagcctgggcaacagagagagaccctgtctcttaaaaaataaaaatgagggccgggtgcagtggctcacacctgtaatcccagtactttgggaggccaaggtgggcggatcaccaggtcaggagttcgagaccagcctggccaatatggtgaaactcccgtctctattaaaaatacaaaaattagccgggcgtggtggtgcgcgcctgtagttccagctactccggaggctgagacaggagaatggcgtgaacccgggaggcggagcttgcagtgagccgagatcacgccactgcactccagcctgggggacagagcaagactctgtctcaaataaataaataaaaataaggactccaggacttggaaaacagtctatatccagggaagaagctgcaaacaggcagttccaaggccagtcctgtttttctaggaaggtcttctgagggcacctgccaagagcgaagcctgacctgcatggctggtcctacttggacagtgttcctcctgaaggtggaggaagtgacactttcttctgctttatagacagcccacaaatcccttgggagtggtaactgcctgttttacctagagagcagtttttattgttgcctttgtttttgtttcttgagggaaggtggtccttggctccagttgttgctgattttatgaggaacaggcaggggaattcaagccactctaaggagtgttctctggcattgcccaaacgctagaagtccacaccagcagcagcagtgggttttgggtccaagggatgtaggtgtgcagtgtgtcggcggtggaaacagaggtggagcagccatgtatgtgcaaggagagcgtgatgttcagtcgaatgactgggcatttcctggccagacctgtctatcctactgcctagcttgtaggtaatccctagtgtctaagaactagaagaaattcttgggctactgcaccaagaggragaggatctcctttttcaacagatggtccatcctttaaataagacatctccaaaatacaagccaagtgtttccctggagactttacatccacactttctgagtcataattaaatgcccctaaacttacccaagcatggtagccaggtgacaaggagttataaatcaatattcatctttcttagacagtagttggggacttgattcacacttcacactcatgctgatgttttcagctgctgctgcttttttttggtagagatgggggtctcactatgttgcccaggctggcggtcttgaactcctgacttaaagcaatcctcctgcctcagcctcccaaagtgttggaattacaagtgtgagccactgtacctggtcagttttcagcttcttgtatctgctcggactcaggtcattggaccatcatgtcccggtccctgcttccccgtcatttccttcctaagcagccctttgagggcctctctttggaagaaatggtctagagggtcaaagggaagaggaccaatgaatggccatagctcctgttcctggtagatgctttccccattcttcatgtggctggaatactgttgctgaggatccacctggcaggctgcaggctggacttactgtacagcagggtgggtttgatgtcttcacgctcacctccatgcacacagtgtgcagtccttccttttgttcctagctgtagatagatgtcttcacttaggctcttctggtttgcagtaagtagacaggaatatgtttgagacggggtcttgctctgtcacccaggttggagtacaatggcccaatcaaggctgactgctgcctcaacttactgggctccagccatcctcctgcctcagcctcccaagtagctgggaccacaggcatgtgcaaccatgcctggctaatttttatatwtttggtagagacagggtttcaccatgttgcccacgctggtcttgaatacctgagatcaagtgatctacctgccttggcctcctaaagtgctgggattagaggcatgagccactgcacccggccaggaataaattgattgggtctattattggaattcagtctgtatgatttttcagatattcatatatgtatttttcatatgttcattgattctaaggcacagacacttcaccatgtaacaactttaaaatcgagatgtgctatataatcacatcttaaaattataaatatctgtggaataccatattgaaaaaaattgttggcagcttttcttccctttcttgaggtttataatgatgcctcttacaattgatggcatcttggagtcacaaaatacattatgtaagttcaactcatttttcactttttttgcctgaagaatttgtgaatttcctcgaatggacagatttaccagcaagcttcagtatatttgggcagtactggatgcagccgataaaatggtttactctgcacagagcagtcacacatccatccttggttggactttaaaacaattctggaataggaagggcactacttgaatattactaagtagctggtacaaggccatctggctagtgattgggaaagcgtgttttcctctgatgcctagtctgattctctttcttccataccagtcagtgtggaattcagaaacctcagagatatgttggagtggaatctaccatgcttagagtagaaaatgaagatcactactaagaggatctttatagttggtaaaaattgagaatcctaatacccaacagaagaaagtggctaggcacagtattattagattatcatatggaatacaaacattgaaaatgacaagtgcctagattgcagttgatacaaggaagcctatatttgtaaagagcagaatataaatatcctaactccttgacttccaatgccaaccatttacctccttgagccaagcatgggggaggcagttgaggcctaggcagagttagaaaggctgcactccagagaaaatgcacagagaagttatggagaaagagataaggacctggaagatagaaccaagagatttgacatacaagcagcaggagtactagaaagagaaagggtagaggaagggtgcctgaggcaggactggccaggactagcttatactgtcataatacacagttccagaagcttgctggctcagctcggcacattgatttcttccccatgctgctgcatacagtgcaggtcaagaggtgggactctgctcaccattgttactcagggacctaagccagcagaggctttgtcgcaacacctgctccctggtcactgcagcagtcaggtagaatggcaggtcatgccctggcccttaaagtccgcttgggtgtgtgcacgttcttccgttcacatttcattggccaaagcaaatcacaaacccacccttaacttcgaagagagcaggcacatgcagtcattatatatggatggaaggaggaaggctagaaatatttggtgaacagcattgatgacttaccaccaggggaagtaatgaaacatatagaagaaaatttctctaaagaaggaagacttgaggctgcatattgaaaggtaaaactgataagagaagacactaagcatgtcctggtaacgtttctgaactcttaggatgaagagaaaaatcttcaagctttcagaagccaaaggaacaaattattaaggaaaagagtcacactggcaccagatttcctatttacaacaccaagaagctagaagatggtggaatttcatctacagaccacggggataaaaggaatgcagctcaagcatcctgtacccaggcaagctatccattcagctgtcagaatgaaagaaaggtatttgagcatatacaaggattgagagtgtgcccccagctgtcacccgctgcccttgtcctcacggtgcctagatgctctgccctcactgttcttctaatacatcaagggctctgctcacctgtcacctcctcagaggctgtccctgaccgctgtatccaaattagcacacccacccactctacttggctttttcttcacaacacagctcactgcttgacactttgttcaatgtttattaaaatttcaaacgtttggaaaagttggaagaagtttaacttatgcatctttgtttctgttcatttcattttaatgcagacatcagtgtacttccttgacacagatcattaactacagttagttaactgcarttccatatttgtttacaggttttttttctggttgaggtaaaatttgcagacaatgaaatctcaaatcttaagtgtatatttggtggattttgacaaacacatacgcgtgtgtaacccaaaccctcctcatgatatagaacatttttgtcatcccagaaggttctctcattaccttctcagtgaatctctgcccccaccctaacccctggagacaaccactgttctgatttcttccacagtagattaattttgccttttctagaatttcatataattagaatcatgtgtgcacttttgtgtccttcacttggcgtgttttaattcatccatgttgttgcatgtatcagtaattcattgctttttatagctgagtagtgtttcattttattccacggatgtaccacagtttctatatccattctgttgaccaacatttggattgttaccagtttttgcttgttaggaataaagctgtgatgaacattcttgtaaatgactatttgtaggtatatgttgacatttcttttgggtaaatacatagatgagaatttgcttgggtcacaggctaggtgtatgtttgttttataagaaactaccagacctttccccaaagtggctgtgtcattttatattccctcaaacatatgtgagagttccggttgctacacatcttcaccgacattaccaacatctggtgttgctagtcctttaaagtttttgtttggtattttaatagacagatttattggtcagtgttttctagagaaacagatccgacagagtgagagagagagagagagagagagagagartgagtgtgtgtgtgtgtgtgtgtgtagagatttattataagaaactggcttacatgattatggaagctgagaaatcccatgatctaccatctgcaagctggagacctgggaaaactcgtggagtatgtagttccagttcgagtttgaaggcctgagaaccaggagagcttatggtgtaagtcctagttcaagggcaagagaagaccagtgtcccagctcaagcagttaggcagacagagagtgaaatttctcctctttgccttttgattctattcaggtcctcagtggattggatgaggcctgctcaccttggggagggcggtccgcttcactcagtctatggtttcaaatgctgatctcatctggaaccaccctcacagtcacaccaaaaataatgttgagccaaataatctgggcaccccatggcccagtcaaattgacccatcacaacagatatgttaacacacacacagatacattaaactttgtcagtatggctgtcttctgatgtctgcttatgagaaatttctggggaaacaggtgagcctccaggccccagaacagaactgcagaggttgagtccagaagagaggttttcgaagaggcaaaagccagaattcctgggcctttcccagtcaaggatgttctctaggagagactgactcacacctcagcaactgataaattgtgccaatgttttcacttatttctgtgttgacagagagggagtctgtgtctttgagggtgaagaatgtgatacctacagcttagaaatgtgaaagaaaatcatcagtgttaccccttgatcttttattcataataaatcccatttatgaaaattagtttattcaagtcccattttattgacactaagcaccatgaggatgtgacggaaagattgaggctggaaactaagaactgaatgctaagggcaaagtcaaggggcacgcgctctctgagctcctcagccaagagttaccctcatctacccctctgccccaggacctcccatctgtgtggcgtggctttctttaccctggttgcttcctttgattcttctacctttaggtgatcccagagacaggcagaactggggcagcctttaaaatagcgcatcagcatggggaggggggcagaagggagggctggggagggaaactggagcaacacgccgccagcacatggtcctgtcctgagaaatcaggtcttaaaggaaaaggttgcagcttcggaaaatgagaagtgcattggtctccagagcataaaaactcgagttgatattgcatgataaatgttgtagtggattgggagagttcttgtagcttgaaccagttgcccccatccttcctcggctgctctgtcaaatggtagggcctgggtgaagggatgcccagttaccctggtccaggaacattgatgcacatgaccacatcagcattcctgggatcactgttggttcccctaacagtgggcttaccctgatgttgtgagtgtccctttgacctgacagtaagaggtcacagatggcaagtgcagacttgccttctctcaagagctctgctctctggtacagccaaccaaatggcaaaggatttcccacttaaggcacttgttgaaagacaggaagcagctggactctggctgatccaactctctgctcagctcttctggctgtgtaaacagtgagctgatctgatgacaagagaaagaaaggaaaccaggtctccattagaaggactctcttggcttctcttgattggaagtggagggatcctgtaggcgcatttgcttggcagaacccacccagagcagaattgggtgattaaggacacattccccacaatgctctgtcattcgttccttcctcatctgaacatactggcagaaaaggacaaggaacccggggtacgttccctgcctctgcctctgtctggtgggaggagatgattgcctacggtgaaccagtatcaggcttggccagcaagcccgagcaaactgacatctcccttcactgacagttgcaaactttcggcagacacagcccatgtgcagggagccgctggggcgctggctggctactcccctggcctccagggtgtgccgctcagagcctgctctcagaggcttagggagtgtcctgtagatgtctcctgaagcatctcttacctgctctgagtgctgatgaaggtctccgaggaagtttgacaaaatcatgcaggccgaatgagtttgcagacctttggtttacttttgttttggagggctgattttaatttggtgtgagcttttttccaaaatggaatcaaaatttcctggatgttttaaccttcaggtagttcataaatatcacaggatttatcattctgtagggctgtagtggacgcttatgggaaaagatttgggcaatagactgggagaatccttcttgatcatcggatgacatttcaggaaagaagctggggatattagtcttttctagctgtccgtgttttttctgtccttcttaccttttaccctttattttccatttaaaaggtcatctgcagattcagcatcttacaaccagtgctgtaggcccagtgccaaatggaaagcagaactccagatagttataacagagttcctaggaaaaaaaagtgtccattgtttcaggctacaagttagcccggactatggggcacttaaggagaaattgctgggacagtgtagaaggttcataaatgagtatttggtaatagctggtagtatttctgttctttctgccatgtaactcttctgtgctagtcagtcagtagcacagcacacgagcaagagcgcagacttcctaggtgtcgtgggccagctctgcctctttctggccatgcgaatcttgatcaggttatgtaatcttctgagccttgatgtcctcatctgtcaaatggcgttaatgatagatagtacctacctaccgtatatgagaagacatgtaaagcaccatggctgtccatagtaatgactcaataaatgcaaactattatttattatcatatgcaagagtaggtgctgcagaggttaaagagagactgttggtttccagttggcagtatggaaagtgccagtcgtagtgcacagtgctcgagaggttcaaaggaaacgrtgatggcacccggcagagatgggagctgctggccaccccctagtggactctgcatagcccatggccagtgtgcccttgccatggtctcgaggatggaaaagccaggtcatcatgtgatttcccactcrcataatagacaccaacttactcatttttgttttttgtttagacagggtctcactctgttggccaggctggagtgtagtggcatgatcatggctcactgcagcctcaacctcctgggctcaagcgatcctcctgcctcaacctcccacgtagctgggattagaggcatgcaccaccatgcccagctaattaaaaaaaaaaagtttttaatagagacggggtctccctgtgttgtccaggctgatctcaaactcctgggctaaagtgatcctcccaccatggcctcccacaatgctggtattacaggtgtgagccaccgtgcccagcccagagctatttcttgagctatgccaaaataaaacagaaacaccagaggtagtagatgctggtgttactaaccctgctttagttaaagtgtaggcctcttcctacaccagtggtgcttcctctccagaggtaatatttcccaacatgcctcgttcttaaaaccctatggccaactctccctaccctgatggaaaggactttagatttgaagcagagaaccctgaggctagtctcagctccacctcctcagttgtgtgacagtgtgctactcagaggccttcaccagggcccattccctcatctggacagtgaggggattgctctaaacttgagtctccgccttttttttctaggacatgaatgtctggtgacattcccttgtagaccttcttgttgggtggcctacttcctagtaccttagctgtaactcaactcccctcctgcactcaaggaatcacrctggaatacaggggagtaaatgatgctattatagggataaccttgaatctgttctgagttatcagaaacataagtacctgcaaggtgtagttttgttcttagtcacaggtcactttaacgctaggcagtgagagtgtcagggcctggaggcagaaggcctgtcctagaccacatccctcctctccttccacagcctcagcctgcaggcaggtgccaagttaaagtgcagttgtcctttagttatttaaagggttgcaaaaccttggtctttggggttgaaaaaaaccccatgtgagtgcagagggacttaggctggatcggaaaagcatcttccatctgtgagacgcaggttcacacctcacctccccatcgagctgtgaccctggatctgcacatttctaaactgagttagaaaataatcagcctggtgtgtttagatccagctgtgcaagaaaactggatggaattcccctcctttctttatagtcttctggggtttgttgttgttgttcttgttgttgtgtcctttttgtggagaacggggtctcactgtgttgcccgggcaggtctcaaactcctgagtccaagtgatcctcccaccgtggcctctcaaaatgctgggattacaggcrtgagccaccacaccaggcctggtcttctagctttgttaatgatggatttataaccacccagaggttagaaatacagccctttcccgaagctccaccaaagtccttggattggtagcgtttccaagactttttaagtgacatgctcagatgctaagaatctctgaggaaagaggttggggaaatggcgactgtgccatggagtcaagtgtccactttgtctgtagttagccaggccctgaattttctgcctggtcccatagttcaaagcactgccaatgaagggaaaaaaagaggatttggagaggactttaagcaaagtggttgcgtcagttagcctcctgtctctcagcaccccgggccaccagagtcacggcttttcatgcagagttaggcacccaattaaataaaaatttaattttaatttgtattttttgtagaggcagagtttaactatgttgctcaggctagtcttgaactcctgagctcaagtgatttccccaccttggcctcctaaagtgctgggattacaggcgtgagacaccgcacccagccacattcagccttttatctgtttcataagaaatgttgggtgactgatgcctgtaatcccagcactttgggaagctcaggcaggtagatcatctgaggtcaggcatttgagaccagtctagccaatgtggcgaaacctagtctctcctaaaaatacaaaaattagccaggcatggtggcgctcacctgtaatcccagctactcgggaggctgaggtgggagactctcttgaacccgggaggcagaggttgcagtgagcggagatcgtgccactgcactccagcctgggcaacagagtaagactccatctcaaaaaaaaaaaaaagaaaagaaaagaaatattgcagatggttatcactagtatcaattaaaactgcatatggaaaatttgactaacacaagagtccagtctttacaacagtatagtgaactcttgaactacgtgggagactctgacccccacacagtcaaaaatctgcatataacttttttttttttttttttgagacaggatcttgctctgtcccccaggctggagtgcagtggcacaaacatggctcactgcagctttgacctcctgggctcaagccatcctcccacctcagcctctcaagtagctaggactacaggcacacaccaccactcccagctaatttttttttgtaatttttgtagagacaggcttttgccatgttgcctaggctggtctcaaactcctgagctcaagcagtctgccggcttcagcctcccagagtactggaattacaggcatgcacgaccacacccagccctgtggataacttttgactcccccacaacttaactactaatagcctactgttaaccagaagccttaccaataacataaacagtcgattaagatggattttgtatgttataaatgtattatatactgtattacaataaggagagagaaaataaaatgttattaagaaaatgataaggaagtggccaggtgcggtggctcacacctgtaatcctagcactttgggaggctgagggcaggagactgtttgagcccaggggttcaagaccagcctaggcagcatagcaagaccccatctctaatattaagaaaaaaatttttaataacatttaaaaatatgtataaggaagagaaaatatatttagtgttcgttaagtggaagtggatcgtcataaaggtcttcatcgtgttcacattgagtaggctgaagaggaggaggaggaggggttggtcttgctgtcttagggtggcagaggcgatagaaaatccacatggaagtggagccccaccattcgagcccatgttgtttgagggtcagctgttgttaaatgtgccacattaggaagtccaggctgggcgggcaggaatcacagtcacaaaagggagaaactgtgatgtgcacaatttaatgcagagaaataagatttcagtggcaacagatctttttgatagaatgtatatggaaaagaattgatccatttgaaaatcatttcaatgaaagtagaatggaaaaaattagaaataattcatctgtgttgtatggacaaatggatcaggggattaggtttgcttaacggagttcaactcgaaagattctcaaccaaaattctccagtatgggtacaattctgtatcagttgaaactctggatgtgtaagcagttcacacacatctcaaaggacagtggccttaagccacaaaggaggcagagggggctgtgggtgagggagagagttgctacctggcatgggcggctgaggctgggagctgggtgagggatgagattcctcccagggtgatccaaccaagtggctgaaaggctgtgaggcagaagaatgttaaactgttatgcaaaggctgtttccaggtgccttggtttgatgcctccctaccccattgtccaccagacccatctgagaaagggtctaaagaagataaaactcaagtcaggtrtcagtgaccttggttaaaccttaacgaggcacataaggcagggtgagccctagtgaaagctggcagtcagtcaaaggctgcaataaaaggcaaatgccaccgggcgcggtggctcatgcctgtaatctcagaactttgggaggccgaggcgggtgaatcacctgatgtcaggagttcaagactagcctggccaccatagtgaaaccccctctctactaaaaatacaaaaattagccaggcgtcatggcagacacctgtaatcccagctacttggaaggctgaggcaggagaatcgcttgaacccgggatgcagaggttgcagtgaactgagatcgtgccactgcactccagcctgggcgacagagtgagacttcgtctcaaaaaaaaaaaaaaaaaaggcagatgctcaaatgagtccttgaaggaggacaggtccagggtctgttctgatggtcatcctccacattgaccctgagcccacatggctgtcattcgagagtgtccayatgtactgtggatgtactggatctggagaaaacatttcatcccattctcctctctttcaggtttcaagtgccccatttgctccaagtctgtggcttctgacgagatggaaatgcactttataatgtgtttgagcaaacctcgcctctcctacaacggtaagggcttggcctgcctcaccagcctccagagcatccgtcgggggagccggccagtccttgtgggagcctccagtcgagggtggttctgggcagtattttcaccctgccctctggcaggtgtgcctcagtggtggtgaggaagtggactgttctgggagccttgctgctcaggtcagagaggaagaggagtgggacaaggaaggaaggcccaggggtcaggtccgaggtctgggaaggctctcgggctgctcagttaggcccctgcctctctgcaactcagttctgaggactttggctgggagatgcagcctttccttcacccttgactgtggaaggccccaagacagccaggtgtcctccacggcttagcagaggggcccagagcaagcacccgccctccttggggaggtgggggctgtgtgctggtggcatgcatagagtgctgggaagctggtcgtctccttgtcacgttcgaactcggacgaacacctgatttagtcctatgagtccacaccagagagcttgacgggggactatgtgtgacatagagacgctctggggattgaaaatgcggataggacaccttgctgctccaccctggccatgttgcctcctaccttggaggctgcctcagagccgaacagtgaataccgcagagggtaggaccctgagggcaggggatttcaaaacacccaagctaacctaacaggacgcctctgggaaacaaaatgactgtcaacatctgcctagcatgctgtgcataaggctttggagtccaggtgatgggagttcaaatctccctctaccactctgtgtctacaatcttatacaagttgctcagcttagcggagcctcagttttctgctctgtaaaatgtggatagcaatacttggttcataggattgtcagaactgggtaagagatggcacataaaggcctttggtacagagcctggcacatggtcagtgcttgggaagttacagctgccatgaaagatgtgagaccttcataggtttctttttgcagttttccagagcccacagacttctcctcagtgctgctcagcccacgccactgctgaccctcgattttccatgcttagtgtttagtctggtctccaaaccatgttcatcagaaaacggcatcttccactagaccaggcagtggatctgagtgcactccaaccctggtactggcccaccttcccagattcaagtcatagtagtggttggaaaaagagttctgggatttctgagagcatctgaggactggatcacgcaaccagcccagcgagaatgtttcctagggagactcttctctgccctgcagcctcctcactcccagagggctctttcccctacaaagcatgagcctaggagggatcatggtctcagagcatttcctgggaagtaactgactaatggcgtccactcaggtctcctgaaaacttctctcttaattacttgttcagccaaaagactctggatgcaggtgggcatattacccacgtggctcagctccatgcatttgttaggccatgctcaggtgggaggacccgcacggccctcccctgggcatcatagctgtggtctgggaagcccctttcctccccaggggacagcgcctcctttctcctgggctgactgctgccagttctctaagtctgttgtcacatgtgctgcaggcttcgcgtcagtcctgtcgcatgcatgctgtcaggacgctcaggctcagctttgtccctgttcgccgtctccgcttgggaccagggagggagaggagccttccctgcgtctcacagccctccctagccatggcctcaaaaaccctattcacttctttcccacatgtgtggagacctcatgaagtcctccgtttgtcctgtgggttgctagggcgttctctgtagacactgcgtttgttgtaggaagaatacaaagaagcctcagaggggctcagcctgagaaaacctggctctcaggaagaactttgcaagagcagccgtggaggacagagtgctcttgggcccccatggcccaaatgcagagttacccccactgccctgtggagaaccgggaaggtgaggctgtccagctcctctgccagagaactgcctgggacgccaccatgtgtccccctgtccccctctgtatcagcacttgagtgcctggcgctgttggtttacccccctacaccccaccaccggcagcctcacccaagactacagaaaccacaccgggagccgggccccccttagaggaaggggagattggccagccagcctgaggcatgaccactgctcctctggttctggttctagtttttcccttgtcatggaattgaggggcaggccacctcctcaagggtgcatgtgtttctgtatgtgtgcrygtgtgtgtgtgtgtgtgtgtgtgtgtgtgtgtgtgtgkgtaaactagaggctttacacctaaggctctcttttgcaaaagccagtcctttaccactggaggcaaagagaggccagttgtctccagtccttccagtggactttgtctcaacgtggtgaagtgctttgttcagaaacaatggtccggccctctgtggaccctgttcatgtggtatggactcctcatgttcagtctttgtcttttctgaagaccctaaaccttccaggtaagaggagagcatttgcttccgggggtgtatgtggagtgggcatccccaggcacgcccagggcctgctccagctcagagagagcacagaccgtgggccaaagctcaggagctccaatgtattccccatgatttgtcatcatcccaacctcacctgctgcatgttaccttttctaatttaaaaaaagacttaagagtcagaggtgtgagttcttggaatctttctggaaagggggcgaggcggggctttcttagtgaagagttttcttatgaagattcactagaactcctggtcactcccctgaagacttcccatttacacacacactttctgtggttgttggcaccaattgcggaaatttttagaaaatttatgatggttatataagatgaaatttagttaaccactaaaggaaaaaagtagaaacctcctaaatgaggcagatagaaagtagtatttttcttattatgagggttggcctgagtggtgggttggaaggcctccagtagctgcctgctagcttagaaaaaacacaacttaggaaaggcgagactagtttaactggttcagctagtgcctggtgctccgaggacaggcacctggctggggaagtttgggaatgtgctgagcccctgctggaggggcagggaagggcggttgactccagagcaccgaatgttaaaccccctgtcctcctaagcgccttcctggaaggtgaggatactgtataagagggagggggttcgttggtttgtttttgtgggtaagatggatcaacccgaatgggccttttaatttctctccctttctaacatctctgtttgtgactctgagactgagggaccttgccctaaagaatacgcattcaaattttgaccctcgagtctctgggctagcagaacaagcgtggaggtgggggtctgattggtgatgctctgaacggaagagcattgtaatcctgtggagtcgtggagatgacccgcttttgactggaagcttaggggtcctcagcccagggagaatctggggggcggcaggttcatttgccagcagcaccaaggagagctcccctcagctgtgttctgggggagcagaagcccatgctcagcttcttatgtcatgatgccctcttcctcccctctgccaaaggccattgcccccatctttaaggctcttgagatgctaaatgtcacacaagctgtcttttaaaggcaagggaggccggatgcagtggctcacgtctgtaatcccaacactttggggaaccgagattgcttgagctcaggaatttgaaaccagcctgggcaacatagtgagaccccatttactaaaaacaaaaaatttgtctgacatggtggcaagcgcctgtagttccaacttctcaggaggctgaggtgagaggatcacttgagcccaggagattgaggcagcagtgagcttgatcacgccactgcactccagcctaggcaacagagcttgaccctgtctcaaaaaataaaatataaaataaaaatgtgagaggacctggcttcctggaaaagcagaaatggctcctgctatagcctgccctgtgcctgcaggcaattctttgtcccatgtctcctcctctcagagaccctgtggtcagaatgaaagcaccctaccctttccctgcctggggaaaccgggtgctggccgaggagtttgcccagccttgcttggggcattgcccagagccattgttagatgctggatgggctggagtcaggctggacaggctggagtcagactgcggaggtgtctgtcctgttactcctcctacaggagggcgaggaggggcaggtgactgctcacccagggtgtccagctgttgctgaccggctgcactgactgccagactggccgctgctgggtgtatgaggagcgaaagcgactaggggaggcctgcaaggccctaacacaagtggggaaaccaggaacaggtggctacaggaaagaggactgtgggagggagctgtagtggcctcagtaggaaagtwtgaagcgctccaggcctgagctttagttggctgcccccactatcctcattgcgggtggcccagctcaccaaaacaattgcattgcacttcaaagggctgggcagttggatgggccgctgctggtaggctacactctctgctcaaggtcaccctgttgcctgaagagcacagccccccagatttcccaaaaggggagctgacaaggcctggcatgggtggcactgccctgtcctgtccctggcagactgggccagcagctctgcatgctgaataggcagcaggaccaggcactccaccgcacctaggctggaaatgaggtcagggggtggaacctgagcctgtgcgtcatttgctaggggtttcccctctgactcccaccttccttctctctgggcccttcatggccaccaggcacaagtggagatggagaggcatgttcctgtgctcagctgctgcctcggagctgcacgggctttccctcccagccaggtgcagatctgtgtctgcagctgtgtgagcctccccacccctccatacttctagcagttccagggtctcttgaggatgtgttgccagaactctgcagaatactcgagcctggcatggtggagggcaggtgtgtgtctctcctgtctggtctgttcactcagtgaccaggttcctccatccaccttgggtcctctgcacacacttcacagaaagggggagatgcaaagtgcctgtgagacgggtggtgttttccagccccaagggaagacacccttatggcctggtcttttaaggaaaaggggccaggtcgctgggtggcagaaacttgggcttgggagtcatcaccacttagcagctgcatgagcttatccgaagatccccacaggggctttaggagtcatggtgtgtgtgtctgaggagttacctgcatatagctggcttagagaattaaggctcttttgctcctcctcccagatatctttgctttgacaaatagcagctgtcagaagcaccgtgcctggatcccagggagggagcagaagatgccaccgcctcccacccccagcccatcacaggcatcatccctccctcctgtttcagctccagggccgtgctcgccattctggtttggttccctggtctggttagagggacaggcactgacaccatccccagccaggccaaacacacttccaagctctcccttgggcagtgacattggctggctttgtacagtggcgtcaggaaacttgggaggtgcttcagaggtagtaagaaaagggcagaacccagatggcagaaagtttggctttgttcttatccggcagcatttgttgaacctcttctctaggggcctggagataccaggggacatttgactccatctgcagcagagtctcagtttgtgtgggccaggcgcctgggttttgtgctgcgaggcccccgccatggcttttctctgacggcaggcagcaggttcgtgtcagatgcttctggaagtcttgtaggaaccagttgataggcaagcatcagcttcagccatttccacttccctgctaggctctcagggacatccggaggccactaactcccacagccccaggggtggggacaggaagttgtactcagcccactgcaacctcttgctgggtttgtgtgcctcctgcctcctgctgtggaagaatgctgctccctgggcactgggctctgtgtgggcactgctggcttccccatgctgtctgagtcaaagaccctgactccttcctattgccgggaacctccaggtggccttttgcagccagtggctcttggtcccagtgaaatgtgctccctgccgtgtgccagcctggttggggtgcctgcacattttagttcttcccaccagtgcagcagactcaggccagctggtaaaggcacaacactgcactgtgcataaaaccgccttgtggagtggtgaggaaaggctgcctctaaccttcctctgctcaagtctgagtcctttagtgcacaggccttccgccccaggacaagaagaatcgccctcgcgcccccttccccttccccttccctttcccctagtgaggttcggtgcaaaaagagagtcaagtccagtcttgtcataaagcgcctaagccttatcctcatacctgcctctcccttccctgaatccatcacctcctggggggcgatgagggagaccacatgtgccctcctggagctgacacagatggggagagaacacacctggtgtgggaagctgtatgggacccagagaattctaactagtcccttgggctcacagttgagttaccaatcagtaggagaaaatgcaaagataaactacttaggaatcagtaattgccatgttcccaggaaatcctccttaagtatggaggggaaggaatgctttagaggaaactaagggctatagcccatacgctcatgtcatagatgaggtgtccaagacaaagagagtggggaatacaggtccaagaatgtctgcatgacgactctgccctcactaagctatgctgtttttcctcccatctctgttgaggtttttccctctgttttattatgaaaaatgtcaaacacacagcaaagtttttatgtttttttgagacagagtctcgttctgtcacccaggctggagtacagtggcacaatcttggctcactgtaatctctgcctcccgggttcaaatgattctcctgcctcagcctcccaagtagctgggactacaggtgcatgccaccatggcaggctaacttttggttttttaatagagacagactttcaccatgttggccaggctggtctcaaactcctgagttcaggtgatccatctgcctcagcctcccagaatgctggaattacaggcatgagccactgcacccagtgtacggcaaagctgaaagcattgtatagagaacacccttattgctgggcgcggtggctcacgcctgtaatctcagcactttgggaggccgaggtaggtggatcacgaggtcaagagatcaagaccatcctggctaacatgatgagaccccgtctctactaaaaacacaaaaattagccgggtgtggtggcatgcacctgtagtcccagctacttagtaggctgaggcaggagaaactcttgaggcggaggttgcagtgagctgagatcatgccactgcactccatcctggcgatagagcgagactccatgtcaaaaaaaaaagagagagaacgcccctattacatagcacatgcaccacctggagtctgcagtgtactagacccgtttatccatccaccaacccatcttatccttctgatgcatttcatagtaaaatgcaaacaccagtatgcttccttatcagggtttttaactaaagtagtgcacattcgaacgctacagaaatacataaaaggatttttctccaagtcctcctttcctctaccactgtgaaagtgtgtgcatccttccagactttgatctgtgcctacacatgcatttgaatatgtatggtagctagtgctttcaagcagggggatcacacccatgtgttcatccactacttgccatgtttggagtctgaggggacagacacttcagcagcagactgtgccatctcccttctcagtttgtgtcaccctttcaggtgggtcctcgggctagccagatgttctagacagaaaatgaccacaagttgtcctggtggccaggaagctgasagtgacttctctcgcaactcatgtgcctggggacttaaggatcgaatcggttccattttatgctttttccttggggttcctggtggggggctttgaggagcggaagccatagccttctgggccctgaagaatcttcattttatgggccccaggtgtttgcctttccaccaaaataataagagaacacaaagaaacagcaatgggaaggcctcttaagcagagggtcccagtcccagccccacaacccacaagcccactcatgaggtgtgtgacttccttgggcttccggatcctcattcgcaaaatgagaataacactgggtgccctgcccagcttggaagatggtgatgctcaaaggaagacacgcacatgtgtttgtcattggcagtgttcgggacagttaagttcctttagtgacggagaagggatcctgccacaagctctgccttcttcacagctgagacactgctctcctgatatttctcctgtggcttggaggacttctgggtcgccttttgttcacgtcgcctcttttcacctgcccttcaaatattcatgtcggcctgggtttgtcttctgccttctttggattttggtctgaactttctccctggactgcctctttatcccacatccatgcctggcacccatgtctctgttccaaacctcagctctaggcttcagcagcctcctggaggtctccatcagctggccgggcctcctcccacccaactcagaatccgtcccttccttctcatgctttcctcctgggcaccctcccttagtgcaggcacctgctgtgtgtcccgctgccctcatccgcacacgcagggctgctgcgcactccttgttgtcggccccagacaccacagcagaacacaaggctgttccctgtgcccagaatctcccgtccccaccccagcttcatccatcctcaaccttctccagaaccttcccagatcagcccccatcctgatgaggtctctttccccataccctcagccctgggcctgcgcgtgagaagatgtcctggaagtcctcatgctgtgccttttgatttccttgttcggcatccctgctagtctgtgagctgcttgaatcccgagatcatggctattcactgtcgccggcacgcagaatgccataggacttaataaaaaccagtgggttcccatgggtgcaagtagcttccttccattccttctttttgggatggtgagcggggtcacttttgtttctttctttttaaacattgagatgaaactcaccataaaattaaccatttttatatgtgcaatttaatagcatttaagacattcacaacccccatctttatctggttctaaacacttcatcgccccaaaagaaaacctctggtgtgattccacttacatgaggtagctaaaatactcaaactcatagaagcagagagtagactagtggtggccaggggctgggcggggggaaggggagtggtggattaatgggtataacattttagttatgcacgatgagtaagttctagacatctgccatacaacatagtgcctacagttgacaatactatattgtacacttgaagatttgttaagaggatagagcatatgttagtcttaccacaataaaataaagtttttaaaaggggaaaaaacgggtcaggcgtggtggctcacacctgtaatcccagcactttgggaggccaaggtgggtggatcacgaggtcaggagttcgagaccagcccggccaacatggtgaaaccccgtctctactaaaaatacaaaaactagccaggcgtggtggtgggcgcctgtaatcctagctactcgggaggctgagacaggaaaatcrcttgaacccaggaggcgggggttgcagtgagccgagatagtgccactgcactccagtctgggtgacagagtgagactccatctcaaataaaagcggggtggtggggggggagaaaaccccctacccattaagcagtcactccccatatccctctgtccccaatactgatctcctttccctctctatggatgtatctattctggacatttcatataaatgggttcatacaataggtggtttcttttactttgtgtagtatttttgacgtttatccatgttttagcatgtggtggttcttccttttcttggcttagtaatattccattgtgtggatacatcatcttttgtttatccgttgcgcagtttgtagacactgggttgtttccacctttgggctgttgtgaacaatgctgctgtgaacctccgtgcacaaggattttcttggggacctgtttcttcctctcattcttgcctcctaccactctacccattaccatatttttccaaaccagacatcagcacactggctacgtgtgtgtttaggaaagcatctgtggagggaaacagcttgcctcatgctgcccctgcttcctgtctacccttctccaagcctttttcgtccgctgtcacctaggcttttggttaatcacatgttgagattaatcccattttgtctttgggtaattaacatgtgatgtccacgcattatctccacggtgaaagtcttaaggtcaacgtccctcttggggttctgtgtcccctgcagagccgggcacagcttggggcagctaagcagtcccctagttcctaggcccttgcttgccccatgccacctgtccactggtgactaaccctcctgcactctcccctgtcccccttgcagatgatgtgctgactaaagacgcgggtgagtgtgtgatctgcctggaggagctgctgcagggggacacgatagccaggctgccctgcctgtgcatctatcacaaaaggtaggaggggttggcaaggtagcttagtgcaccccacctcccagaggggcggacccccatctccagccattctgtctcctttggttatgggatgacctctcccccracctctggctccgagcgggtaagggcagaggccrtcagacaggtgtccactgtgccggcgggaaggtgcgagcatcccaagtgcagagcagagtggagttgccagaggtgtgctctggtttgagggctcaggtggtgggagctgatggggagacccgtagagcctcacaggttggaggagcttcggatcccactgggaaggttggttctccgtctgtctccctgcctcttcttcctctacgggtccctctgctccacaggggtagaacatcaatctgtgcgaggaaggccaggcggagggtgtacccactgccttgcactggccttctccctagagggccgggaggcaggaagagccatttcctgtggggccacagcactgggcacagttaaaagtagcagggcccagatatgccttgggactccagtgtgagcctcgtccttgtttccagctggaaggaaggcaccctcttgcccaagacaggacactgtgctgcctggggccagcacctgctgaatcctcgagcccagagcttcttcctgacactcaggcctttcaaagcctgactctcagggccactgctgcacagggtgacaaccgggcatggcacgcagtgtggctggtgcagaggaggcttaaggctggcctgggagagattcttggtctagctcccagcacggagccttgcttgtgtcccagggcggcactaaccagaaccagaaaaggaaatctttggccctcggggagaattatgccaattatctgtctggttcctgtctttgaaaatgcccagatgttggtttacaaatcaggaagctgtcttggggcaatctctgttccctctttgatgcagagagcctttctctgtaaacactggagagcagggcttcactgtctggctcccctcccgcctcttgcaggaaggactagatgctgctgatcagctgatcatggctgagccgggtagagcttggggctctcctaagaggtcacccactgggagggagcttcacagctgttcttttgacccaggaaggagctctttcaggactgtggcacccagagccgtggccctcctgccatgccattgttcccacttccctgcccttgggagtcttrgagacagctgactagctgccctgaggggtccaccgctctcaccttctcactggtggctgctgccattctcctgggctctgcacagaaagctttggtccttctgaaagccactctgccccttcctgcagcaccagatccccctgagccggtactgctgcctccacctgggccaagactagtcttggtgttcacccttcttcgtgcttcagaaagtagggatatctggggacatgactgtgtttccctggggtcctttcagaagagacttaggaagctcctgctcaggaatctggccctctgaaagagccccttcaaagcagcctgggcagcaggtaacgtggtttcccttgcggccccctcctcccagctgcatagactcgtggtttgaagtgaacagatcttgtccggaacaccctgcggactgacctgcgggcttgcttgctgactcctctcaaaggtgagcccgcgtttgggggtgctccgggctcaaggcttggggtcaggtcactttgggggcctgcagtttagggagccgggctgcccttatgccactgagaagaaagcaggagcagagggaaggagcacctcatcagtgagcagttagtcatccggaaatgattttccctgggaaggacaagagatacaaaccaacatggacagttatgaagaacaggctcagaagagttaggatcagttggggaagagaccagtacaatctacattcctaaagaaagttcaggaatatcccctgggaatgtgcacgggcaggaaaaggagcctgagcggtgggtttgtgcctggcttggcctcatcctcgctcacctctgagtctccgcctcttctatggtaacggggataatctcactccctgttgccataaggacattgcacttactaaacagccatgggcagtgcattgttccctgcaaagtgctggtcagcgatcatttgaccactgcttcttcccatgccgcttccagatgaatctgaggcctccaggccagactcgatccctctatcccacagcactgggtgctgactccacacntccccctggcttaccgctgggtctggcctccccatttctcccccaggggtaccccacttgctgccaaccatccacccctgacccccatctcacctgtcccctccaagttctgggctggcattttcctttttctggcaaacaagtagacaaaacccccataaaaaccaaaagcccaactccatctcacagccaaaggttttgggacctttttcttcccccctccctttctctctctcttgctttcgttttcttttgttaggtttattttatttattccaagtaaactcccagaacagctgatgatgtcagacaaatcagggacatttgctctttttacctccacctcaaaaactgatgacaaggggagaagaaagagccaggggggagagtgaggcaggggagtagaacctgcccaggcacatggctgcaaattccccgtgtgctgtttggcttctggggtcctgtgtagacgccccagccccgcctgccctcttgggatgcagctgccctgggatgagcagacagccctcggcccgatggagcacgacttatttattacggtccacacagggacagagcgcccctgctccagggaggaggctcaccggaccctggggcagagctgagcttgggacaccagcgggaacagggcaccccttctgcactgacttccagatcatggttctcccttcctccctgaggacaccaaattggatgagagcaagtttgagagaagaatgaatcaactgctatccttcccctcacccctcagcccaggagggaaagggcattttctttttcatctttgaaaggcattgtgggtctgtctttaaagtgtttacaaaaaaaaattatataaaaaaaaagtctagtgtcgactggtgttttccctcgtgatgtttacagcttgctgtttgctgcccagccataacccactcagtgacagacgaacacagctaaggcctcgctgccagccttctgacggcgggcgagcacacggtctcttcccctgccccaactggccctctccaccaccaacttctctactttgggtttgtttggttttttccctctatttttctggctggttttttgctcttttctccccttgagaccctaatatcttgacttcattgccaaaaaacaacccattgagaactttcttcctactgatcccatctcttttcccttctttcctcctggttccggtcagttcagaggatttaacaatcacaagtgtcctgcaaaaatgcctgaacattattcttaggccctcgtggattttttttttcagaaaacttaaacaaaaaaagacttactaagaaatatgtacagctacccctgttttcaggcactatgtttgagaacattttagccattgatgttcacacgtggcatcagcccatgcaagataggtttctgtatttatatattaaaatacaaaaaaaaacttataaaatgtttaaaaaaatgttcaaagcttgggagaaaagctttcttcattagtcaaggtgttttgatatggtattaaaatgtctaataaaagatggcactgcgtgattttattttaatgaagtgttatacaatcaagaaatgggggcaagggcctgccccccactccctcacctacctccttagcattccttcaggctgctactcggggctccaggtgtgtgaattggtcctcagatagtcaggcctgggtggagggagtggcaagtcaggcgtgcctcctacaagcttcctaacctcttaagcatcatggaaccagtcagccctctgtggagtcattgtgccggacctctgaaaagatctgcaggggccaagatgttgcagccaccggaggctgcaaggatgtgggttcttccaggtgtgggcccagcccccctccttccagcctttgctccccatcccacgttccactcgccctgcctgttgttcagtttgcgtctcagtgctgactcacgggcatgcttcattgaggcccaggaagaggccctggtttggggctgtgccagctcagagcccttgaaccagaaccaactgctcaggctcacaaaagttggcaaaatgcgggctgggcaggcagctcggggcagggagcagcagtgcaggcctggcctgtgtccccgtgcccagcgggctcccggagcagcattccagagcctcctgcagagccagygaaggaaagctctagagggagacgactccaccgcctctctgctctgacccttctcaggcccgcctgatgtgctggaccatccccctgctgccacggcccctggctccgcagtcaccctccatcagatgcttccagaagcacctactctgtgcaagggcattcacaacaggccagtgggcaaacgtgagccagggccagcggagaaacactaaagaagactcggtggttcagagcctgggtctcagcgcgggacccgtctggggtgaagaccttggggctgttgtgagtcggtggcaggaacgtgggctctagactgtgcattcaggctctcctacttggcagaatgatcttggggaaacgacttcatctgaacttcagatatttcacatgtgaagcggggacaaaaccatgcagctcagaggtccctgtgggggctgggggagctgccctgcaggtcttggcacatgcacagcaggctccccatagctttgtcaccacaaagggcactgttctattcacagcacctcctgcttctgcctggcaactgtgtctccctgtgctatatttaattccaccagcaaagctggcgaggcagggcccagccctgaaggagatctccttgcctgacccctggacctggaaatggaggcttcatgtgcccgccttggcggcttaagcctgctgctttggcagtgccatgggtgagccgagcagctgtgaggtgggtggggcagggctgtagcccacgccgggtgctattccaggctctaggggctggtgctcatccccacccccagcgacttccgtcctacctggcatgctgcagccctctgccggctgtggtgtcctctgaatttggacccaggttgcctgctcttgttgtgggggtgggattggggctgtctgtgtttcccaggtggagctcatgtttgtgatcctctatctggacagctctccagaatcctgtgttgcccctgttctgcctttctgggatgggagagaaggtgagggagccggcgagcmggttctaccctctctgctaagggcctagcacrctttgatgaggttcctggacgtgagaccctcacaaagaccaaccattcctctaatagccatttaacggtactgcagttcatgggaaaatgtcctcattcttaggagatagwtgctggattatataggtgaatgccttcaagaaatgtgtaatttaattccaaatagttccccccaaaatacacaaagcaaataaggccaaaatgttcattgttgaatctgcagtggctggtatttcagtgaacagtgtacttgttctttcaacttttctgtatgtttggaatttttcttaataaaagattgtgggaaatggtcatttgctgagcgcctcctagttgccaggcactggagggcgcatcaaagaagagtcctacccaggagggagagcgcagctgctgcaggattctcgcctggaagagtgggtggctggctggctggctggaaggggaggggcgagagggctgtctcggtgatgagcacacgcgtgctggggtggtttggggagagggctgagatttgtcaccagtgagcccttggcacggtctctgctccccaccagggcagcacgggacagaaacgtcacggaggagtagcctccaggctcaggttggtgtaactgctgtcggctggagcccagtattagcacggaggaggggttccaagaactgaagttggactggggcgtctcagcgcagctgcctctgcctaaggcctagcagcctgcctgagcactgacagctgatgggaggaggagaggggcggaggccagggagggcgtggggtgtgacatgcctctttccaaaagggaccgaaggctagaggggcaaggaagatgagacagcactgcaggttcctgggacctgcaggggatggaggactagcttggcttccaggctgccaggacttacctgaccctaggaggaggtttgcccagggctgagtgccgcaggccctgggcagaggagtcgtgagctgcagatgccgcgtggtatctgagcttcatgatttcgggcgccctcctgtgggcttaggggggaacaactgccaaggtctcaagacgggctccggcccaagacaggggcaggccctcgggtggacagaccttgagggcaaaacagctggtggtacgatacatcaccccatgaagaggtgggtgcaaaaatagtctcatctctgtttctagagacgtggcagctgctgaggaacacattcagtgtgttcagaggcccggttcaggcccagttggggagcccatcctgagtgacatgtgccgtgggcaggtcctcagctctgaggcggagtagctgggacagggacctgggttcctttccgaaccctgagcaccaacctcctccccaggctataagaagtcagaggacagccccaaaacaaaggggtcactgaccaaaggacagagaccctggagggggaggggaggaagtgctgcctgctgacttccaggtagctgtaggtgggtttcaggtttattacagatttattgggggaggccccaaggagaagacctatcatcatgtcacgggagctcacgttccataccaggaaaggagtgttcctgtcaccaggtgaagggggaagggtcctgggaccccggcagtgggaggcctcggggaggggtgtcatcagagtcttgaatggacccagacgctctcttcccgccaggacaggatgcgtaggagcagagaggaagcagctttgctgggaaccaccctgggtcgtttactgaaccaaaggctcctggggccagccagagggccagggaggtaacacggtgctcaggcttctctctgggccctctggccttgggcccagatacagtgggctcgctggcaggaagactgcctcagcatctatttccttgcaggggccgtggcatgaagaaaagttccagaaccggctccgtagtcagggaacttgtgggctaagtgctcagacccccttcacagcactttgcctggattcatgaggccttgggggtctagcacggccttgagctgccgcatggtctccacgcccacggcgcccacctcctcctgcagcagctgccgcttgcccattccgatgccatgctcccccgtgcacgttccgtggagagccagtgcccgcctgggggcaggaaggagacatcctcagggggctccctttcctctgccctcagctcttcccctccctggctttgctcctacctgcccagctgttctgcaaaagccttgaccctgcccagttcctcggcgtcatcagggttgaccagcaggatgcagtggaagttgccgtcacccacatgcccgacaatgcttcctgggggcccagaggacagaactattctccagcccagtcctcctcttgcctcctgctgccccaggctctgatcagccctgacacctccccacctctccccagcagcagggtgggcagaacctgtgagtcctgaggcattcagatcctccttggtctgcaccacgatctccggcagccgggagatgggcacacacacatccgtggagtagccctggtcagagggaagcctatgagttacccctgcctgattgggtgtacggggtcaccgtggtcaaggctgaggatgggtcggagggcactgggcttcagctcttggcctcacacaaggaaataatcctgctcttctctaggcctcagccctcacctccccccgacacaacacaggagaccaatggcccaggtgtgcttgccacacctcccctgtggctcccacccccaagccccaggctgctgagcctttgcatagctgcctggagcccagacttcccttccccaggttaggctaacatccccctctctatcatctcttcctccaggaagccttccttccatgtacagctcccaagagcaccgcaccgttcccatgacctggctcacaggaagggcttttgagggcttagcagacaactgtgctttccctgtagacggtatctgaacagctgggtggggcggtctgcagcccttgtttctagcgcctgctcagccaggcccagccccgttgttgaggctcagcctgctgctctgtgcagtagagtggtgggttgaggaaagggtttgtgggccgagctgtgggccccatctgtaccccagccccagctcaccttgcagcctggccgcgtggccagggctgcgtaccaggcattgtgccgtgctgtccaaagccggctgcgctcctcggcctccttggcccaggagaagtcagaggctccgttctgctggactatctcctctgcagttggggaaggggggctgacaccgggccgccactgaggcagcccaccctgctgccccactccaccccagcatacctgtgcgctgcagctgctcctccagtgcctgctgggagccatggaactccaggaagagtgtgggcgccactaagcaattcagcttgctgtacctgttgcaggcatccatcatgacttcatccaggaactctggatccagggagatggcaggccaggtgaggcctggccttcccagggggcctcttccagggagcccaccctgactgcccccatcctcagctcaccaatgcgggctacgggcactgcagcctggaggatgtgtacagtgctgtccacagcagcctggacactggggaacgcacacgtggcggccactgtggcctcaggggcagggtgcaggcgcagggtggtggctgtgatgaggcccagcgtcccctcggagcccacgaagagccccgtgaggttgtagccggctgcactcttcctacgtcccagggacacacaaggtgagtaccaggctgtgtgatgagggatttctggccagaagccgaagctggaacccaagacaccgaccccaggcactgaggtctgggctggcctccctcgggcccagtttccctggcccagtgctttctgctccacaaagccagtcggcctcaggcagggagagcaaaccctggtcccatccactttggcccagctgacagggcttcagagcctgaggaagcctagcctgccaaaccagggggccgccaggaggtgcttttcacagcccggtctctgcagggcagcccgccagcagtgcccagggccagagcccgggccccccgcagagggcgctcaccggaaatgccggcctcggcccgccgtgtgcagcagccgcccgtcgggcagcaccacctccaggttgagcacgttgtcccgcatggtgccgtagcggaccgcgttggtccccgacgccccggtggccgccatgccacagagagaggcgtccgcgcctgggtctggagggcggcgtacagaaggcagcctcagggaccggaggtcctttccctcgggctgggggaggaaggtcccctgaaccccagacacagccctgctcccacggtgccctcagggtcccaggaaaggttcgcgagtcctacccacgggaaaccagaggccgctgtcccgcaggtgggcgttgagggctttgcgggtgacacctggctccaccaccacagagaagtcctcctggttcagctccaggattcggtccatatgcgtcaggttaacgcagacgccgccctggttggggcaggtgctaagaccactgcagacctgggtctctgacctggccacgtccccggaccacaccccgcgggtgtccccccagcagccagaccagacccccagaggcaggcagcccacgggcgggagcagacccaaggtgccgtgtgtggcgggggaggcagccacaggtgtgccaaggtgtgctgggaccatcctcgggccgggcgagggagccccactgtacctgcacagcacagacgccaccctcaagcccggtgccggtgccgaatgggatgatgggcacaccttggcgatagcacagggctgccagccggctgacctgctccacgttctggggccacaccacagcatcaggaggttcgcacctagaaccagaccctcagcgatttagcggggcgtgacaccctctggtcccgaggtgttgcagggcctgaggctacagcaagcgaggggcagagaacatgccagagcaccccaaaacagatgagtgaggaggaaggcaacccagcaccctctctctcagctggggttgaatccagaagacaggggaggggcccgcgaaccctcccatacctgtgcaccgactcatcgcgcccgtgctgctctcggaccaccgcggcagtggacacgtgggagccgcccaccacggccttcagagcctctacgaagtccctgcagagctctccctgcagggaagaaacacactgccagggtcccccgaaagacacatggggccacagccctgccccagtgtcggggggagggctgggggctggaggctggagtgagcctcccctgcgcccgccccgctgacaacatccttgccaggtgggcccactttaaacaaacccactatccagaaatgcctcttttccaaacagagccattgggggtcaaagtttcccctcagaaaaaaacgccaccagaatttttttaatgttttcttttttaataaaaacagggtcttaactatgttgcccaggatggtttcaaactcctgggctcaagcgatccacctgcctcggcctcccaaagtgctggggttacaggcgtgagccacagcgcccagccatccaaataaaaaaccagaattcactctccaaaaaggctatcagcagggttccttcaatagccagcccagcctgagcaaccgaaaagatccctcacttcctcctttctccagggccaaccaagcaccaccccagccacagggaactcagagcttgataagggaattagggggaggaaaagcttccactgccccctccccactctacgttgcctggggcttctgggcccttcgtggggggcggggcgcggcggggcgggggatgtgtttcttcccattttacagatgagaaatggaggccaagttaaggacagagcctggcctggaacccaggccctttccttcagggccttcttccacaggtgtgttttattccaggggcatccatttgactcccccagccccactcatggtagcagtggggactcagctgatctcactctacacccacccacagttgccacagggtaagcccagtgcccttttgcccaaggtcaggtcacttggtgctggggcgtcacagagcccaggaaacttgggatcagaaccccctgctccccgctccccacctcatccctccagaggacttctcttctctcccggtacctttgccttctgggagcagtagcccctccaggggaacagctcccaggttgcagacctgagcagtcgggccatagccaggcactggccagagggtgtgagcactgggtggcagggtgaccagtcagctactgtggcagcagctactgctgctgtcagcccattggctaggccaggggtggggcctgcttaaggtggcacgggctttaaggtggcccttgcagatcttgcagacattttcgtgggctccagggacgacacttctaaaggagaggcgaggttcactggacgttttgggaaactgtaaggcaaaaataaaattctaagcctcccaaccgactgaatgg

SEQ ID NO: 97666 - DNA, 15786 bp, Homo sapiens
  misc_feature (1)...(15786): n = A,T,C or G
ctacctgagtgggggacccgaggcccacgagtctacaggaatcttctttgtggagacacaggtgcagagtgacaaaccatcttgcttggaggccagggctggggcctgcagaggcctggcaatgcatatcttgtaggggaggtgttggctgggtcacaattccctccagagtcacaagatttgccctcagtgcaagggaaaggtccagggacatgttcagccccttaacatgcctccctaaggacagtgcagaggtctctgaggctcaggaattctgggcacagccctggcaggagaagtggcaagcttgaatgcctgggtctcgttgtctccccacagaacgtgcggagattgcccgagacggagatgtgggctgaactctgcccctcggccaaaggcgccatcatcctctacaaccgggttcagggaagtcccactggagcggccctagggtccccagccctactcccgccgctctgaaaataataaacgactttattcttggattccgttggcatctgctatttctgtaacagagaggagcaatgggccctgagtgtgtaaggcaggacaagtgacttgggaaaaaaaaaaaaaaaaacccgcccagcctgtgtccccctctgcaagcaggggataagaactgtgcctccctttctttgctggctccagagaggctccggggcggaagcagctccgtaagatatacctcgctgcagaggggagcaacagcggaacggagacacggtggccgggccgaaaacgtcacaaagccgcagagagcgggctctgtcccgcccgctccccaggtgggcgcccgcgcctgtccagcgagtccgcaggctgggggaccggaggcaccaaaggccaatagacatgtaggggcggggtctccaccgattttttttttttcctgacaggtggacgtggtcttggcatccacgccaatgagaatgtgagggcggggcctgaatagacgcaggaaatggcgacggccgcgggtctgtgagcagcgggggcggggcctggttgtggcccctccttctcccgtccccaagttccctgggtgggaacggggtcttggggtccctggctgggtggccagaccccgaagccagcgctgggaagggctgcggatgcccgggtcagaggaaggggcaggtccaaggacacgcgggtctggtcctgggcaagaaccgccccctctccgggcctgcttcagtcttcctttgcagaacaacgggccaggccccttccctctgcccccgggtgcttgaagtctagccccatcctggtccaatgcgctcttggtagcctcctttcccagctgcccgcccgccgccatgccgcccttactgcccctgcgcctgtgccggctgtggccccgcaaccctccctcccggctcctcggagcggccgccgggcagcggtgagttgggcgcggggggccggcccggttgttcaatgggtttctgtttgccctacgtgctgagttagttgtggtctctactccgtgtcaggaggctcccaggtttgtctcaggtaaccctcgccttccctgctgaggatcagagatagagaagacccccaaggtcatacaccgatttaagcggcagaggaggaagtttgagtccaggtcaaacccaacgctcttaccacagctctagtggtttccaagcatcgctgtatcactgtgcataaccctctgtggggggtgggagatggggaggtgtcgggtacaaaatccagattcctgggctctgctctggagattctgaactggaggaatcaattgggtgggggtcaggaatcagtttctttctctttttccttttttttttttttttttgagatggagtttcgctcgttgcccaggctggagtgcaatggagcaatctcggctcaccacaacctccgcctcccgggttcaagcgattctcctgcctcagcctcccgagtagctgggattacgggcatgcaccaccacgcccggctaattttgtatttttaggagagacagggtttctccatgttagtcaggctggtcttgaactcccgacctcaggtgatccgccctcctcggcctcccaaaatgctggattacaggcgtgagccaccgcgcctgtccaggaatcagttttttccaacaagtttttggactccactttgagaaatcctgacctgcactatgcctgaaacactccaaagggggtgctgatctggagacagatctgtcctgggacctgtttcagccctgtcagctcctggtggctgagttgaagggtgtggcccagaaggcagggcagagctagcttctgggttccttcagcccctgcaaggtttgggactctgtccacaggtccagacccagtacttattatgaactgttgggggtgcatcctggtgccagcactgaggaagttaaacgagctttcttctccaagtccaaagaggtacccgtacccctgaggtggggagggggagcaggaactttgagccagtgggggtgtgcttcaaattcccaggagtagaccagcatctctggcgggtgccacattttttcagccctcatagggagtggcaggtgctcaatggtaggggaaaggctgtgggcaggagccaggggtcctgtctgatgggctgggcttggttttcttgacctgcctgcctgctcttgagaaacctggaccagggcatatggtgaatgcagggggctggcaggtggggagggcttgaacacaggaggaagcaggagtccatgctctctggccttctgaggagtgggcaggcctgagtgagggtcactgaccaggcagggcctctgggtatgactggagccctggtgggtggatgtcatcagcatgggtcctggggagggacaggcaaagggagataaggggagtcctgccccaccccagctgcacccagaccgggaccctgggaacccaagcctgcacagccgctttgtggagctgagcgaggcataccgtgtgctcagccgtgagcagagccgccgcagctatgatgaccagctccgctcaggtagtcccccaaagtctccacgaaccacagtccatgacaagtctgcccaccaaacacacaggtacagtaatcctgccctcagcttgccccacccccaggtctcttgggtagtctcatttccacaatgtcccttcctctgcctcccagcagctcctggacaccccccaacgcacagtactggtcccagtttcacagcgtgaggccacaggggccccagttgaggcagcagcaacacaaacaaaacaaacaagtgctggggtactgcctcctcctcatgctggcgggcatgggcctgcactacattgccttcaggtgatgcctgttctccccggggtgatgggcagagggcaggagggtgggtgaattccagtgtggtcagccagtcctccacagcacctcgtggcccgtactcttgtgtctctcaagctaagagctgcttgaagttggtctctggagcctctccttacttattaaaggcagcgctgcaccaagagctaacgttgtcatttacagtttttcatatttcgaatgtaaatctttcatgctggctgccaggaagggattgagccaaacaaaatcaagcacaagcagcaaatgcagcacagctcattcatttggcagtaggcatctccctgccactctcacgcgtgccacggagctgattctctttattctctttttttcttttttttttctttgagatggagtctcactctgtcgcccaggctgcagtgcagtggcgcaatctcggctcactgcaaccccacctctgcctcccaggttcaagcaattcttctgtctcagcctcccgagtagctgggactacaggcgtccaccaccacacccggctagttgttttgtatttttagtagagatggggtttcaccatattggccaggctggtctcaaactcctgacctcaggtgatccacccgcctcagcctcccaaagtactgggattacaggtgagagctaccgcgcctggccacaaagccgattttctatagcagatacctaaaggccagtgcccactgctagcagcctgcctagttcagtgatggagttagacgcataccctttctagtcttctgggaggagcacccccatgtccacagctgctgtcacacctcaaagtgaccagggacttcggatgccattggaccctagacaagccagggccactctgagccctccctatctatcacaggaagggttagactgaggttcctaaccctgtgtaagggtaaaaagctgtgaggcccctagagtggggtggaagggggcaggacttcagggacagcaggaattggattcccagggttaattgtgacccattgcaggaaggtgaagcagatgcaccttaacttcatggatgaaaaggatcggatcatcacagccttctacaacgaagcccgggcacgggccaggtctgtccctgctctattctgctccctgctccctgtccaggaaccacacttcgggatccctatcccaaccacccaggtgccctctcctccagggccaacagaggcatccttcagcaggagcgacaacggctagggcagcggcagccgccaccatccgagccaacccaaggccccgagatcgtgccccggggcgccggcccctgaggggctcacctggatggggcctgcagtgcgttcccgctttgcttccttccctggacggcccgctccccgaaacgcgcgcaataaagtgattcgcagagctcgtgtccggctccctccttaaggcccgacgcccccggccccggcctcgccaaggggcagcgccccgccctccgggtagttttcaccacgggggccgaagcagccgcgcaagcgaatagagnnnnnnnnnnnnnnnnnnnnnnnnnnnnnnnnnnnnnnnnnnnnnnnnnnnnnnnnnnnnnnnnnnnnnnnnnnnnnnnnnnnnnnnnnnnnnnnnnnnnnnnnnnnnnnnnnnnnnnnnnnnnnnnnnnnnnnnnnnnnnnnnnnnnnnnnnnnnnnnnnnnnnnnnnnnnnnnnnnnnnnnnnnnnnnnnnnnnnnnnnnnnnnnnnnnnnnnnnnnnnnnnnnnnnnnnnnnnnnnnnnnnnnnnnnnnnnnnnnnnnnnnnnnnnnnnnnnnnnnnnnnnnnnnnnnnnnnnnnnnnnnnnnnnnnnnnnnnnnnnnnnnnnnnnnnnnnnnnnnnnnnnnnnnnnnnnnnnnnnnnnnnnnnnnnnnnnnnnnnnnnnnnnnnnnnnnnnnnnnnnnnnnnnnnnnnnnnnnnnnnnnnnnnnnnnnnnnnnnnnnnnnnnnnnnnnnnnnnnnnnnnnnnnnnnnnnnnnnnnnnnnnnnnnnnnnnnnnnnnnnnnnnnnnnnnnnnnnnnnnnnnnnnnnnnnnnnnnnnnccccgcccaggtacgtgcggcccgacagcgcgcccgcccgcccgccgtgccctctctcaaggttggcggaagtgaggaggcgacccgcggcctcggccgaggggatctgcggggtccggccttggacgcgggcgtctcgggggcccggcgcgtgcatcccctgggaggtgcccctccccgctggcccgccagccccagtctggggccactcctccgccccaccccgtcccctgggcaccgccgggggcggggctccctcggtgcctgcaggacctgcttcggtgggcactgtgcgcgctcctgatctgcatgcagcccccaaacatgctcggctccgcggcctggagatttggcgcggccaccagagcacctgttgcgttttgggccagggcaggtcccgggtggccaggagaggacaggtaaagctagagcagtggccgcaggaacagagcaatctggaaagatgtcagagaggtggtgaagcctactgatgcaagggcaaagccccagggacggtgacagggccacaccctcctaaagtgtaccttgggtacaggtcttttctctcccacaggcccctgtctcccagcctgatgcccctggccaccagaggaaaggtaatacttacaaaaactcggcactagccagcactaagagggtttgtcatgggccctgattccaggtgtccatcatcttgtgtaactcccctagaagattcaaactattattctacccatttcacagaggaggaaattgaggcagtggggttactgggatctggataaacagggcaggggaagacaggttgtgagggcagagtggggagggctagtggagggtggctgtgacttggggactggggaggacagatgctgggagcagctgcaggaaaaccagtgaggacttaacccctaccggtctgctcccagtggtgtcatggatagatgtgtatactcgcgctacctgccagccccgggaggtggtggtgcccttgactgtggagctcatgggcaccgtggccaaacagctggtgcccagctgcgtgactgtgcagcgctgtggtggctgctgccctgacgatggcctggagtgtgtgcccactgggcagcaccaagtccggatgcaggtactgggcaggtggggcaacgggcaggggatgcaggtactgggcaggtggggcagcgggcagggtggatgctggctggctctggggctggggcagcctggagactgatgcacaggagacagggttggggggagggctggtggccagcctcccggctgttgggtgagcttttctcycttcagtcttagagcatcccctttctctctctccctcactgtcccccctgttcttctcctgagcacagatcctcatgatccggtacccgagcagtcagctgggggagatgtccctggaagaacacagccagtgtgaatgcaggtgccagccaggcccaacttctgagctcgcagaggccaggcttkgggggtgctgggtatggtggtccacagaactggggaccaggttcctaagagtagaaccaaggggccgggcgtggtagctcacgcctgtaatcccagcactttgggaggccgaggcgggcggatcatgaggtcaggagatcgagaccatcctggctaacatggtaaaaacctgtctctactaaaaaaatacaaaaaattagccgggcgtggtggcgggcacctgtagtcccagctactccggaggctgaggcaggagaatggcatgaacctgggaggcgtagcttgcagtgagccaagatcgtgccactgcattccagcctgggcgacagagcaagactctgccacaaaaaaaaaaaaaaaaagagtagagccaagggtaggccttggatctggggcaacaaagtaggatgcttgggccgggggtagtggctcacacctataatcccagcactttgggaggcccaggcaggcagatcacctgaggtaaggcgtttgagaccagcctggccaacatggtgaaaccccatctctactaaaaaaaaatacaaaaattagccgcgcatggtggcaggtgcctgtaatcccagytacttgggaggctgagacaagagaatagcttgaacctgggaggcggaggttgcagtgagccgagaccacgccactgcactccagcctgggcaagaagagggaaacacagtctcaaagagagagagagagagagagagtaggatgctgggatttcctgatcttcctcttgtttgtctgtgtctgtstatctkacttttcagacctaaaaaaaaggacagtgctgtgaagccagacaggtgagtcttttggactccagctgagtaggggtatggggagtacaagtgagtccagaagctgttgctcctctttctcctcccacccgtcccccactttcycttttcctctgctccccaagcctgtgttctctgccccgaccccagctctagggaagactcttccttcccaccccagacatgtcgcttctcctccctagggctgccactccccaccaccgtccccagccccgttctgttccgggctgggactctgcccccggagcaccctccccagctgacatcacccatcccactccagccccaggcccctctgcccacgctgcacccagcaccaccagcgccctgacccccggacctgccgctgccgctgccgacgccgcagcttcctccgttgccaagggcggggcttagagctcaacccagacacctgcaggtgaggcgtctgtggggtggtgtttgtttgggaaggcaccaaggccctgtcctggagcaggtccagggtgagcctgccagtaggaggagggccagggaaggggaaactgttgaatgtgttgaacaaatatttaccaaacagctgctggcacctggagctgtataagcaagtccaacattctaactcaggagtcagatacaggagggacaatgccagcagaggatgtcaagggctgtggtgaggggtacctggcctcgtctttcagaggtcagagatctcttggargaggtgacatctgcccggagtagaaatgtaggacacagcttttccagcttgcagttcgggccttcccagaagcccctgtggtagacatctgcccttacctacgggcttcaagaggccaggggacatagtggaacccttgtccacccttacctgatgtgtttctcaccatccgtgtcccgcagtgaggccatggggtgaaatcatatgggcagggccagtgggkgctcccgaggagtgtcaggaggggatgacctttgcaaaaggttcatccttcgccctgcagcctccagtgcccagggccgagtggtgtggcaggatgctcaggttgtgatcttagtgggcccgaggcacacatgagtccagggctggggctgcgctccagccagcatgaacagatcacttcctccctcctcaggtgccggaagctgcgaaggtgacacatggcttttcagactcagcagggtgacttgcctcagaggctatatcccagtgggggaacaaagaggagcctggtaaaaaacagccaagccmccaagacctcagcccaggcagaagctgctctaggacctgggcctctcagagggctcttctgccatcccttgtctccctgaggccatcatcaaacaggacagagttggaagaggagactgggaggcagcaagaggggtcacatrccagctcaggggagaatggagtactgtctcagtttctaaccactctgtgcaagtaagcatcttacaactggctcttcctcccctcactaagaagacccaaacctctgcataatgggatttgggctttggtacaagaactgtgacccccaaccctgataaaagagatggaaggagctgtccctgcctgtgtcactgtttgtcactgyccaggctggctggtttgggcatgaatgtctgcatcactaaatccagagcttgtcttgctccctcattgtgcagatggaggaaatgaggactaaggccccacagcagatcccaggcagggccagaattatgtattcatcactttcaagttattgccacgcatgggagtcagggakagcccagtcaatacagaytgcctgccctcctgctcttcaccagggttcttttctagaaggagacagccttctgtggccagagagcttggggtaggacccagatctactgagtgaccttgcttgtcactacccctgcctctctgagcagcagtttccacatgtgcacatagagggaacagaagattgctgtggttggcgtcctcgggccccagagaagtttgagactatctttacgtaatagaaaagaacacttgttcttcctgccaggcagcgctttcagcatctgctgctttttgttccctgcagcttgaatctaaagcctcagcacctgccctgtcttaacttcactcccacctccctgaaagggaagcaccgcaagtctggggctggtgggcctggtttgggcggcaggctcccctcaacccaacccacagttttttgtgtttttttttgtttttggacagagtctcactctgtcacccaggctggagtgcaatggcacaatctccactcactgcaacctccatctcctgggttcaagcgattctcctgcctcagtctcccaagtagctaggattacaggtgcccaccaccatgcccagctaatttttgcatttttagtagagacgggtttcaccatgttggccaggctggtctcgaactcctgaccttgggtgaaccacctgcctcagcctcccaaagtgctgagattagaggcgtgagccaccgcgcccgcccaacccacacagttttctccaccctcgcctcccttgcatcctgcagcttccttcatcagttgctgcctgagattctcctgacttgtctatcctagcccaagcccagcccctacccttctccctgcagcctccagtgcccagggctgagtggtttggggtggatgaaaggccaaccttgggcaccactgctttgcctgctgaagcaggacattcaggggcagagttaactcaattgggcagccactgggaggggcagccaccctaatggaggctttctctgaggtgttgggtcagagcatgtgggtatgatcttagtgggcctaaggcaggagtgggttgaaccaggagacaattcctgacagcgattactactttcaaatcattttctcagtcatgatgtcactggacatgccataggtcaattagcatgaggcagaaaggggttagggccccagagctaccgcctccagagcccagttagccccaccagtcacgcacaatgcttcacatgcacctcctcacttcctcctcgctcgattctgaggtcagcatcatgattgtcttccttttacaattgaggaaataggctcagaaaggctaactggccggggggatttgacctcaactcagctgtctccctaaccttcaacctaggtttagctgcctctcaactgcaggttcattacttcagttgacagatgtttggtggctgctggggcgcctgaaaataagtctggtgggggaacaggcccagccagatcattccagtcatgagtcacagcccaggtgcacaggtagaggtaagcctggctcctgggagagagatgtgggcaggagcattggctggaagccagggcttgtcattggacatcatctcggtcctgcaggggccctgtggggtgggtgtcatcaagcccgtgttacacgcctgtattggatgacaaattctaccaagcacacagccgaccgggagttcaaacgtgagtgtcactgtgaagcccaggctccacagcgactgagggccgtgggccatgatgaggcccgggaaaacaggagtgctgtgggagaggctgggggcgacttgaaatggcgcctcaagaccccctccgggaacccacgcccgcctgaccttactatcacctcggccggaagtgtctccggccttttcggaagtcactttcacctaaccttacagactaccgctccgccggaagtgacgcagggcagcggcgtcgcgggggcggggctcgggaaagacccgtgccagcgggcgtgtggccgcgggtttcgcacggtccaataagggagggcggcgtggcccggcctggtagcgacgaggacgcgcctgcgcagaggcggcagcaccaccggggttgactccgggggcgcggcgaggaggtgagcgggggccacagcccgggctggggggagccggggtgcaagagggcaggctggatcaggccgggcagaagcggaccgggctccgagtgtcaacgagagctaggtgacgaggaaattgggggtgggggccggagctgtccggagatgccgcagggggagggttctcacgccgcacggggcggagtcctgggactcggggcgggacgtggaaccgggacgggtgggacctccgagctggtgccagtggaaggcggagcccggcggcggggggcggagctaggagggtcgggggacggagcctggctcttgaaggaggagctggaggaggtgaaaggcggagcctcggggtcggaagcagagggggacggagcggaggcgctgggggcggggcttcagccggtgagtggcgtggctacggctccggaaaaggggtctagttctgtcgaaggcggggctgcaggcccgggggcggtaccgcgtcctccgaagggcggtgccaaggagccaagtgaggagcctggcccgagtaatggccccgggcgtcctcgcgggggtggtctccgtggtggccgggcttggggacgccgtaggccgagaactccaccgggagaggtggtgtgggtggagcgggctcggcggccagcagacacagggccagtctgggtgccccggagacccccaagggctcagagttggggcggcgccccgggcggaagcacagggccaggctggggggtatctcccgaggacccgggctcctcggagccacccagtggggatgtgtgggtgcctcggggccggccccctgcagcggccgcagaggtgttggtgtgctggaccgggggcagctgggtgtggcgtgagtggggccgcccagtcggggcaactgcagtgcagccagatagggtctggactttgcgtaaagggacaggcgggaactgaagagcggaggtggggactgggagggagggaaggtatgggggtgagcaaaggggcgggtccctggctgctgtggcctcccctgaccccctccccccgctgctggggtcctcggccaagcccccttctcactggactggtaagtgtggccccggagcccgggggagagggcggtgacccgggacaaaggggatcccccggggcaaggaagatacagtggcggtggaaccctcctgttacctacccgtgttccatactctccctgccctcccccacgttcagtcggtcggtcggggtctgtgcccacagagacatgaggctgagctggttccgggtcctgacagtactgtccatctgcctgagcgccgtggccacggccacgggggccgagggcaaaaggaagctgcagatcggggtcaagaagcgggtggaccactgtcccatcaaatcgcgcaaaggggatgtcctgcacatgcactacacggtgagtgggttgggcgggccttttgggagtgggtggggcttccgaggaccagagagtgcttgggagtctggttctccataagccaggtaggtgaccttgggcaagtcccctctcgcctctaagccagtttccatggttctgccttgcccttgcctactgcccaggtgggcaccagcaggcagtgacagtgtactgtgagctgcccaaggctctgtcctcttaaagaactatgaccagctgggcgcagtggctcacccctgtaatcccagcactttgggaggccgaggcgggtggatcacctgaggtcaggaatttgagaccagtttggcctcatgatgaaactttctctgctaaaaatacaaaattagccaggcgtggtggcgggcgcctataatcccagctacttgggaggctgaggtggaagaattgcttgaacccgggaggcagaggctgcagggaggcgagatcacgccgctgcactccagccatggcaacagagactccatctcaaaaaacaaaaaggactgaccaccagggctgtgggtgggcgtgggggggcagcttgatggggaaagcagctgagggagggggtgtcaggggtggtcccctcttcctcactggccttctcatggttccacaggggaagctggaagatgggacagagtttgacagcagcctgccccagaaccagccctttgtcttctcccttggcacaggccaggtcatcaagggctgggaccaggggctgctggggtgagtcatgggggaatgggcttgggagtgggggcgtgcatggccaccgcccaggaggtaagctgtgggaggcaagccccagggatacaagacaagggccctgggtgctgccatgggctgagcatgtgtcttcctgcaggatgtgtgagggggaaaagcgcaagctggtgatcccatccgagctaggtaagaggcccctcctgagggtgcagagcgagtttggggtgtgtgactgggaagggtgaaagctgcttcagcttttcattggtcttcaccgtatccattcattacaatacatgcctcctccaagtttggctgtgtctagcagtgagtacagggcaagatcattgaagcactcagctgtagtggccccactctgcccttgccaggcctttggcacccccttcccatctccattacccttctccatttctggccttcttgctgagaggggcggaacactctccctttgcccacactggaagggagcttggccatcactgactgtttctttgtgcatcttcaacagggtatggagagcggggagctcccccaaagattccaggtagtaaaccttttgatacctcccatcacctgcagccagcccacctccctgtggccctggttggcattttgactccccttctcccctacaggcggtgcaaccctggtgttcgaggtggagctgctcaaaatagagcgacgaactgagctgtaaccagactggggaggggcagggggagaggcccccatcagggaccagactgttccaaaaaaaaaacaaaaaacaaaaacaaacaaaaaaacacttaaaagcccaaggagtaagcctgtgtgtgtttgtgggccctgagagactcagagacctcagctccagcataccccaccaccttctcctttcccgactgtggagccttgggggtctaggctcaatgacatggtggcccttgcccagagaaaaaggagtgttcctgcctgccaacagcaatactgctccccccacccccacagctccccagccactttcaactcctggtctgggagccagcactgggctatcgtcatggctacgtggcccttaggaaggcctgtggtcacctggggagaagctgagctggcagaagtcaaagagcagtgtgcccccctaaaagagaccagccgagcctgttagctgcaccaaaggcgtatcctagctttattaaagggcccgcgccgcagagtcaatataaaaacacaaaaagtcccatcagtttaataacaataaaaaaccccaaaagtggaaaactgagggggcaggggaagagacccctgggccaggggcacgaggagccctgctcatggcaccaggcctggccgcagggtcccccggtattgctgttgctacgaggttggggggcagcgattgtcctgtgggagccaccgttctcctgggtcggggaccctcacttcttctggggtgtgctcagcttctgcatgccccggatcttgtccagcaggccagaaatgaaggcctggatggggtgggagggtaaacattaaggagaccagaccccaagatgacaggagccgggctcccctcaccctgccacccccgccagccccccaggaaatctcttacctctgtgggtttgtaacagtcaaccagcagctcctagcagaggatgggggaggaaggataagtgagtcctcaggagtgggggcctggagctcgcctatacccacttccaagagactggggccaccctgaggcacaggagatgccacaacaacctcacagctaggcattggccccattctgttgaggcaggagctggggcttgagggcctggctccacagcctcactttcccggggcagtgcctcaggcaacccatcgccccccagccccctcaccttgaccctggcagcccgggcatcgtcactctccatgtccaggagctcatccacgtcaatctcc

SEQ ID NO: 97667 - DNA, 26878 bp, Homo sapiens
gtgccccacaaacgttagcagtttttatttcaacaaaaagtgattgtccagcttcaagctgattctctatgagtctcagatgccctctctggaggccctgagggcctggtgcccaggatggtcccaagtaaagggttttgaagcaggcccagtgataagccaagggaactctgaaaagctgggacaaccacctatgtgggcaggggacagaccctccagcaaaggactcctagccatcagacagacctgccagggccatggaagcagagggcagtgactatgctactaaggacagtggagaagagggctaacgggagggcatagctaggggaccacctgtacatctgggcaaacccacgccctggtaggaagatgggggctgctcagtcactgcgccaactccccagcaagccctggactaactcctgactcctaaagaccaggttggggtggtgatagggaaacagggcctccagaaagtctaatccattggggttaagactcagaagctgccaggcatggtacctcatgcctgtaatcccagcactttgggaagctgaggtgggtggattgcttgagcccgggggttcgacaccagcctgggcaacatggtgaaaccccacctctaaaattaaaaattaaaaaattagtcaggaatggtggcatgtgcctgtattcccagctactcgggaggctgaggcaggaggattgcttgagcctggtaggttgaggctgcagtgggccatgatcgtgccactgcactccagtctgagtgacagagtgagaccctgcttcaaaaaacaaaacaaaacaaagaacctcaatggccacataatcagtaatgtggagctgtggggcccagcagaggggccatgtcccttgaccaggagacagaaggcttcctaaaggaggtaacagttgacgcaggtcttgaggaaagagtagcaactgttcaagtggagagggatctggaggtagtggggcaattctgggccaggagagctttgagaacaaaggcctgtgtggtctccttcccttgcaaactgcaggccccacctctcccagcccaccagccttgatggggtaagtcacccctgcccagcctagcagcccacttcaagggctagtgtctgttcagccttaggccaaacaggcaaaagtgataggaacacaaggcagatgacagacaggtgcacaactgtggggcgcagacactgtttattgagtggcaggcacaggagaggtagctggctccggtgtggaagcagaggtggcaggtcatgccagggtgctgtgggcatctggcagccagggccatgccccccatcctagggggacggcacaagctcactatgacaggagcagcaaggagccggccagaggagggggtagccacgacccccaggatcctgggcaagaagcggcagacaaacttggcacaggggcctagggtgagggggactggggcctgggtattctgtgggggagggagggggatcacgtctgtggggtggagtagagactgtggtggtggccgcctggtcctggcacctgggagaagagcagaggagtggtcttcgtctggctgcccccataccagcccggctcacgcccgatggcaccataccagctcccagagcctagactgcccgacatactgcagcagagaaacagggtcagtctcaggacagtgaccagggccacagtcacaagagctgcaggaggaagacaggcttagaacagaacccctgtgacctagaccttcggggcccaggacaaagtacatctctaggcaagaggtggaggctttagcaataggaacccaggggacctcacctagtacagatggggaagcaaaggccatggcaggggtggaaggcaagacccggctatctcggtcccccatagcttgatggagccagcggggtgggcgggtagggcaggggtactgaggcagtgccacggctcctacctggtgctctcaccccggctgtgctcccaggagcagccctcatcttcacagtgcccagcccggtcaaagaagtaggaccgagaggcaaagacctgcccattgaggatgtggctggtgctctgggggaggaagccatcatcgatacttactcctgtcctgcactggcctcccaggcccaaccccagactccaacccaggatttgcaacatccgccccctccactggccccacagaagagggagcagacccttaccaggtcctgtgggggccggtgcacccggaagaagcccaccagcagggtggtgggcagtagctcccacacgaagaggatgaggccaaataccaggtagcctttgttccccaggtcattcaccaggtccgcctgtgggaaggcaggggctggtgccagtctgcagtcacgccaaaggggtagtgggacagggcccaggccagctggggccaaggtgccacggctactaaggaggtggcagacatgcgtatgcccacctggtcagacacattgtaccagtcgtaatcgaaggtgtccagccggctctggggggccaaggccagtgctgtcaggttgtagcaggcccggctggcatagagcaggaccatggcgccacccatcgcggccgcctggcacacactggtcccctggcacaggtaacaacagaggaccctcagggagagaaggctcccagcttcctctacaccctgagaaccgctgccgagagacccaaaagacacctgggcatcagtgctgcagccctaccttggcctccaggtagatgctagtggagggcgcccgcctggcgacgaggcagaggcaggcagcaagagacagcgcgcagatgacgaacagggagtcgctcaccaggacgcggacaagcagcagggcccagggctgtgcccggcgccgatgggagagcacagcacacagcacgttcaccagcagaaagagcagcgaggcccccacaaaggcccctcggacagcgagcctgcagccacagcacagtcagcgcgggccctcaacagccctcagcactcaccacctgccccacctcctgcaggaaaccccaatgtcgacaaaactcagggcatccagtctgagccctgttcctccactcttacagatggagaaactgaggcccaaaaaggtcagaaggtgactgacagccatggtacttcggaaggtgcaccaactggagtcagaagtctctgtctgagccccagctctgcgaccttgatcctgctgtcttacctggctgggcctcagtttcttcatctctcaagggaggatagtagcctctcagggaaattgtacaaataaaagatggctgggaaagctctttataaaccgtaagacactgtacaaatgacgagggcattgcggccccaggtcacccaggagtgcatatggctttggtgcttccatgggctggagcctccagctcgccctccatggtggatgacactggggccctctccctcacactaccacaagcattcctattcctgtgccttgcagatctgcaaggcctctgctgagccatctgcgccaggtgctttaacttttccaagatcttccacagacattccctgggttgcctttgtctcagccctgagaggtgggaagggatctacatgggactgtcacctgcccctgacctggaggctgagcccaccagtgtcccgagtacttacaagcctcggctcatctccggccgacgcttcaccttggccttgaacaccacctaggagcagagatgcccttcactcctgtgggtccttgaggcttgccacctcccgccccccacccgggaccacagttggttacctgggcaaagtagaggttcataagcgtcaaggtgaagaactgcaggcagacggggcagcagtagagaagccagaagggcaagggccccaggcggttggcgcggggagtatctcggaagtagaaggagaagagggtggtacgcaaggcggcccagagcagacagagggccaggaacaccgtctgatagctgagacgcttgtgcccatacagaagcaccagccagagctgggcatagacggagaagaagagcagggcatacagggtggtgtaggcagctgtcagccccagggtcacagcaggtggcagcgcaggcaccagcccggcagcaggcaccaggccagacaggttactctccatgtcagggagggaggcctgaatcccggagacagacaaggagggactgtcggcgggaccagggaaataaatacggaggggtgggaattgcagggtgcagagagggagatggggcgctcaggaggaaagaagttgtggctgacaggcccctcctcctcaacagagagacccttgcccttggggaacacaggcagcctgggccccaggcccctcactcaggggcatggaagggcagtctcttttctccaggacagaccggataggggttgggggtgtctcctccctgggcctaccccagagccaaggatggggggatgcagaggcccaaggagaggactccctggcctcggtcgttcatgtcgtcctgggtggagggggagagccggctgatacccgtcgggtcagggcagcggccgctgcgaggggcgcccaatgccccgctctccccctccccaagctgggggaggctctctctcctccaataatgcggatggggagggcctctgcctcctgtcctcgtaattctcgaaagctgcccccgccccaccctcccccaccgcgtccacgctccagcctcaaggggagggaggaggcggacgccaggtcctcaggccgctgatgggagagccggctcaggtcgtggggacccggggctccggctccccggctcccgctgctccgcccccctccccctccgcgcctgcgcgggcgccgttcgctacgcaaattgcgcagcggcccggctggctccgcagtccagcgccgcacccggcgtgaaaccgtacgagaattggcgcgagctgcgccgctggcgggcgcccggggttacgggaggcggcaggagggcggccgagttgcgggggccgtgccgcatccagggggtccccgggtgggccgtgccccgtgccgcccgcctttacttgtatgggggtccgccagttcccacgctcgtctctcctatacccaaatcggggtcgtgccgcccggccgggggcggcaacggattcccgtccctcggtctctgaagaaaacttccgcccatagccaagatggcccccgggccccgcccccgggcctgaacccgcggagccccgaatcccccgcgcgggcccgcccctcgccccggcgcgcccgcggccctgctcacctggccggccgcctgccaggcgtgaagcccccacgggccctacggtcctccctcaccgggtccccggccctcctcccgcgcccgggcagccatcccagccagggaggaggttcctttccttatctccagtgcccccgagatggcgcgggaggtgtcccccgaggcgggcggcgcgaagcttccgcgcctgggaggaggagcggggagcgggactttccgaccgggcacccagtccaggcggagcggtaacaatagcaacaataatcacatccgacggctgagcttcagttgtggctgtgccaagcgccttcgcccgcagtaatcactcccttcacaaagttttcactggctcccgggggagctgtcactatccccacttcactggggggaaactaaggcccagaggggctgaaggacttgttggcagaagtgggtctccaggttccaaatggggaccccagagaatccctctcctgctcccacacacgcccaaggtgtgaggcagcgaggatgtgagccccggggccgaaggagggaggaaaaaggctgcggacgaggagccttggatccggcgggggggcggggccgggccgggttgaccccgcctctggacctacccgagtgacgttccgagaggtgattgggccaggtcgctgacagttcccgttgcccaagcaactagggcccggagcccggggtgctggagggaggcggcaggcccgggtcaggggcctcgagatcgggcttggggtgagacctgtgcgccgtcaccacgggcggggcggggcctgggtccaccggggttctgaggggagactgaggtcctgagccgacagcctcagctccctgccaggccagacccggcagacagatgagggcccaggaggcctggcgggcctgggggcgctacggtgggagaggaagccaggggtacctgcctctgccttccagggccaccgttggccccagctgtgccttgactacgtaacatcttgtcctyacagcccagagcatgttccagatcccagartttgagccgagtgagcaggaagactccagctctgcagagaggggcctgggccccagccccgcaggggacgggccctcaggctccggcaagcatcatcgccaggccccaggcctcctgtgggacgccagtcaccagcaggagcagccaaccagcagcagccatcatggaggtaagtaccccaccacctccacctgccgggacacctcacccccagcccactggctccctgcatcccagttgcatccacaggcactgaatgctttgggtcggtccccaaactctcagagccccagtttcctctttcgtaaaacagcaattaataaccaccattgtaggactgttgagttaattagcaggaacatataggatgcacttgattacagagctggtgcacattaaagctaaaaaatggttgctgccgggcgtggtggctcacacctgtaatctcagcactttgggaggccaaggcaggaggatcgcttgagcccagaagttcaaggccagcctgagtgacttagggagactccagctcttaaaatacatatatatatatatagcagctattagtgtggggttaggacagaaatcagtgacaggcaggcagtgatccgaaaaggaaaaggggcctgcctaaggccacaccttcctggtgtttctttccttagaatgtgggggctggaagcctccttggtgccctgccccaggctacatgctttccctgggattaggccttccagctcccagatgtgttctttcttgccctgtggctcgtacccacagcaggactgtcctggcacagtggccaggggcagatgacctcaaggggcagacagtcctcccagacagcagggctgtgtggggtgagaagcacaggctccaagatggaaggatggacactggggttctatgtccatttctcagtaggctctagcacccctgtgcccagcactggccttggcacctggaacaacaacagatatcttctgaacacaaaaaccaggtcaagctgggtggggtggcacatgtctgtagtcccagcaactcaggaggctggcttgagcccaggaattcaagaccagcctgggcaacatagccagaccccatctctaaaaatagaaaactaggtcatgtcactctggcactgcagcttaaaagacctcctccccattttcaggattaagaaggcttaagaggcctctttcccctcgctctcttacggataaacacccacactcgattctctcagattggaccccatagcttgctttctttttttctgtttgttttgttttgttttgagacagggtctcgctctatcacccaggagggagtacagaggtgcgatctcagctcactgcagcccggaacttctgggcttaagtgatcctcccacgtaactgggaatacaggtgtgtggaccacacccagttaatttattttttactttttctttttttttttttttttttcctgagacggagtctcactctgctgcccaggctggggtgcagtggtgcaatctcggctcactgcaacctctgcctcctgggttcaagcagttctcctgcctcagcctccagagtagctgggactacaggcgcgtgtcaccatgccgggctaatttcttgtatttttattagagatggggtttcaccgtgttagccagggtggtctccatttcctgacctcgtaatccacccgcctcagcctcccaacagtgttgggattacaggcgtgagccaccatgcccagcatttttcacattttcatgagatgagggcaggggcggggtctccttttgttgcccaggcaggcctcaaactcctgggctcaaacgatcctcctgcctcagcctccagaacagctgggaccacaggtgcatgccaccacaccagctcattttttattttttgtagaggtggggtcttgctttgttgcccagtcttgtctcgaattcctgggcccaagcaatcctctcaccttggcctcccagactgttgagattactggcgtgagccaccatgctcagcctccacagctttctttaacttcctgagcttgcacttggccatttttctgctcacaaacttcccctgctctctgccccccacacacactcagcattcactcgcgccacacagtgagtgctcaccgtgtgacacaggctgttccagttgctagggggcctcggtgaacccaagcgtcaggaatccttgcccttgtggagcttaccttctagtgagctggtggggccatgagcaaacaagcacaaaagcatcctatcatgcgtgagaagatttgtatgggggcagcatgtaaaagagttaagagaggccgggcgcggtggctcacgcctgtaattccaacactttgggaggcctaggtgggcgtatcacaaggtgaagagatggagaccatcctggccaacatggtgaaaccccatctctaccaaaaatacaaaaattagctgggcatggtggcgcgcacctatagtcccagctactcgggaggctgaggcaggagaatcgcttgaacccgggaggcggaggttgcagtgagccaagatcgtgccactgcactccagcctggcgacagagtgagactcatctcaaaaaaaagagttaagagaatccggagtcacaggggcggggggagtgatggtagcagaggtggtcagcactcaccttggtgagaagcaccactggagccaaggccacagggatgatgggaagagagttccaggcagagagaagggcagatggtaaggcctcgagggcaacacctgctcctggctagggtggrcctaggggagggggtttaggaaagggtatttggagacctaaagttgaaggtcattctaaggactctggcattgcctttgagtaaaaacctggaaaggatttgagcagargcagcatggtcagatttagacattcagagagtcaccagggaggtggtgagaagtagctgatccctggatttatttttaaagcagaactggcaggatctgctgatggactggatgtggggtgcgagggaaagagaggagtcaggatgatgccaaggaattttaaaaaaactattaggctgggcgcggtggctcacgcctataatcccagcactttggtagttcgaggtgggcagatcatgaggtcaggagatagagaccattctggctaacacggtgaaccccgtctccactaaaaatacaaaaaattctctgggcgtggtggtgggcgcctgtagtcccagctactctggaggctgaggcaggagaatggcgtgagcccgggaggcggagcttgcagtgagcagagattgcaccactgcactccagcctgggtgacagagcaagattccgtctcaaaaaaaaaattattattggccgggcgtggtggctcacacctgtaatcccagcacatcgggaggctgaggcaggcagatcacttgaggtcaggagttcaagaacagcctggccaacttggtgaaatcctgtctctactacaaatacacaaattagctggatgtggtggtgggcgcctgtaatcccagctacctgagaggctgaggcaggagaatcacttgaacccaggaggtggaggtcgcagtgagctgaaatcctgccactgcactccagcctgggtgacagagcaagagtccgtctcaaaaaacaaaaaataaataaaaataaaataaattaggccaggcgcggtggctcacgcctgtaatcccagcactttgggaggccgaggcgggcggatcacgaggtcaggagatcaagaccatcctggctaacatggtgaaaccccgtctctactaaaaatacaaaaaattagccgggcgtggtggtgggtgcctatagtcccagctactcgggaggctgaggcaggagaatggcatgaacccgggaggcagagcttgcagtgagccgagatggtgccactgcactccagcctgggcgacagagcaagactccgtctcaaaaaaaaaaattattattattattattattattattttattttatttttgacatggagtcttgctctgtcgcccaggctggagtgcagtggcaccatctcagctcactgcaagctctgcctcccgggttcacgccattctcctgcctcagcctccagagtagctcggactacagcctcccgccaccatgcccagctaatttttttgtgtgtttttagtagagatggggtttcaccatgttagccaggatggtctcgatctcctgaccttgtgatccgcccgccttggcctcccaaagtgctgggattacaggcgtgagccaccgcgcctggccaaattattattaattttagagacaaggtcttgctatgttggccaggctggtcttgagctcctggccccaagtgatcctcccaccttggcctcacaaagtgctgggattacaggcatgagccacagtgcccagccaacaccaaggaatctggcttgagcacccggtaggatgaagttgcttttaatggagaagaaacactgaagggtgagggaggatctggaggctaccctagagggtgggatagagggggattttttttttttttttttttttgagatagagtcttactctgtcacccaggctggagtgcagtggcacgatctcggctcactgcaacttccacctcctgggttcacgccattctcctgcctgagcctccccagtagctgggattacaggcatgcaccatgcccagctaatttttgtgtttttagtggagacgggggtttcaccatgttggccaggctggtctcgaattcctgacctcgtgatccacccgcctcagcctcccaaaatgctgggattacaggcatgagccaccgcgtctggccgctagaggtggcttttaagcatctggtgggatttttagcagggtgctagtgggagctggcagggacttggagtctgaaccagagwtgtgcttgtctcagtccagttaggggtaggggcttcaggtgtgtgcaaaggaaggaatggtagatgtggggtccaagctggctgagcttcagggaagggagcaagccctgggaagccgcagcatcgttggagttggggtcccgggggcatgatccacacaggttgggtcagctggtgggaagcttgggatggagttatttgatggtgacaaggcctaggttatgtccctgrgaatgagtctgaggggagagtgggacaagatcatggtagaaggagtagcaaggtacagaaaggagacagggtgctggtggagtggcagaggacaggagtaacattctgcacaggccagggacgacacctccccccagccccagctgcagacccgtaggaaagagggctgcgggagaagacagctgccaggtgaggacagagctggatttcttaaccttttgatttagttttcagtgtctccaaaagcaagtggtttcccagaaaagatcagcaagtgccagtgccccgccagagccacggggcctctgccctctctacctgcgcagagcaactcacacttggttcggtcactcctcatagtccctgccaccaggcccccctgctggatggctgaggtgtccccagggcagggactgcagccaccttgtgctgtgacagcccacacagcccagtgtctgaaacaggtgtggacagtggagaggcagaaagaagcagcccagtgctagcccctgggccagactgcagggttcaaacgtggctctacccttcctagcaggttgagcttgagcaggttaattaactccatctgcctgagtttcctcatctgtaaaygggaatagaactagtcccacctcgcagggctgtggcgaggacctgatgagttaatataggaaaagtgcttggaaacagtgcctggcgcagaggaggggctaagtgtttgcggctcttattattagaactgccattgttattatttatgtatatatatatttatatataaatatatatatataatttttttttccaagatggagcctcactctgtcgcccaggctggagtgcagtggtgcaatctcgcctcgcagcaacctctacctcccaggttcaagtgattttcttgcctttatgtacattcttggctttatatatttataaagcctcaaatttctgggctccagccatcctcccacctcagcttcctaagtagctgggactacaggcgcacgccaccatgcctggctaatttttttattttaatttttgtagagacaagggtctttctgtgttgctcaggctggtctcgaactcctggcctcaagcagtccttttgccttggcctcccaaagtgytgggattacaggcatgagccaccacattgggcctatatttttaagttatggacaaaaatccaaagaactatattttgtaacgtgaacattctatgaaattcaaatttcaaggtccctaaagaaagtgttagtggaacacagcaaggtgcagtgtattcatttacacattgattatggtttcctttcagctctggccacaaaggtgagtggttgtcacagagaccacgtggcccactgaaccccctttatagaaaacattttcagctaacttaggaaaagggaaaagaaagtgaacaaacatttgccagccagcctttcatacctgtaatcccagcactctgggaggccaaggcaggaggatcacttgagctcaggagttcgagaccagcctgggcaagatggcaagacacttctctaaaaattttttaaattaaaaaattagccgggcatggtgatgcctgtagtccaagctactcaggaggctgaggtgggaagatcgattgcgcctaggattttgaggctgcagtaagctgagatcgtgccaccccactccagtctgggtgacagagagagaccctgtcgctgttttttaaaaacaaaaaggaaacatttgccaactttagagtactttctgattttatgagctctgagcaaggttgggggtgttctctgcaggcctgaaggggcttctgtaccggaaggctatagtcaaggctgaggcctacaggtgccggaggcggacaggctgcgagtgtctgcccagggtggggtggcagcactggccactgtgctggccactgacgtcagcctcccccggcagcagattgtgtgtggtcggcatgtggtaggggcaggatccaaacccagcccttgcctgatggyagagcttcactgctccaaacggtctggaacaccactgttttaattaagtgtgcaattcagtgtgcaagtgtcttgtaattaagtgtgcctctgtttcctcatctataaaacagggagaacttcgtattctccttcttgggaatctgaggactctgaaaatcccagtgcagggatgctcgcggaagcatcagcagggatgtccgccccagccgctgactcagaagcccaacacgcagagaatgtaaagctagaggtgccatgctggggcctggggcacttctagccacagccactaccctccacttccacacccagctccgggccaggctctaggcggatggcaagagtgggcaggcctgggcacccacccacgttcacacccaaggaggagccacaccccttcccttccccagagaagggagagtctggcccaggccctgccccagccctctccttcccccagggaattcacagacactcccccagggtttttccctgtaaatagaacactttttaaaaattcaatttagggctgggcaccgtggctcacgcctgtaatcccagcactttggggggccgaggcacttggattgcctgaggtcaggagttaaagaccagcccgaccaacatggtgaaaccccgtctctactaaaaatacaaaaattagctgggcatggtggcgggcacctgtaatcccagctacccaggaggctgaggcaggagaatcatttgaacctggtgagcagaggttgcagtgagccaagatcacatcactgtactccagcctgggtgacaaagcaagactccctctaaaaaaaaaaaaatacatatatatatatatwcacacacacacacacacacacaccaaatatatacacacacacacacataaatatatgtatatttgtatttacatatatataattcaatttacacaaatgggtatcatcttgataacaactagcttggctaagtccacgaatttggtgaaaaactcccaccccataggacaggttcctggcagaactggtgctagcagaaggcccaaaggggccttccccagcctaggcctccaaggcagcccaaggtacagctggaaggagcctggggcatgacagctaagcacacagcccctgaagccacattggttgggttgggatcccagctctgctacctactagatcagtgaccttgggcaagttacctatgctctctgccttagtttcttcctctgtaaaatggcaaccatgaggaacctccctgatagggtgtggcaaggatcaaatgaatgaatacacagggagggcttccgaccatccaccatacctgcccagtgtcttctgcttgttctgatccctgggcaaggggcagtgcccaggccaagtgcctgggtgcaagtcactcaccttccacctgtggggccttgtgtccggcaagcgtagtggtcctgtggccccactcagagctagtggaggagaacagctgccgtttcctgcgtatttaggtggctaagcaggctgtcccagccacacggcctcaggcaagttcttaacctctgcctctgtttcctcatctgtacaacagggagagctggatattcacctggctgggactctcagaggcctcaggctatgaggggcyggtagggggctttcctgctctcatttgttgtcatggcgatcctggcagatggggaactgcccccatttcacagaagacactggggccccaaagggttggagaatgggctaaggtcagagcaggaatgtggccagggcctggcccacctagctgacccctgctccacagtcaccgcaccacagaactggaaattactctgcagacaggcctgttccgtcagtgccccttctgttcccggctctcctgcccctatccgaaatccttcagcctcccaaggtgctgggattataggcatgagccgccacgcctggctgtcatctgtaatctttactcctgacctagtatgcctctccccactgccacctcactcctccagggtcttgaggtatccccacctgacctgggggcagctctgggctttggtgatgctcagaatgcccaggcactctgatcacagcctatcttaccctaggcctttccggattccgtcctctcgttcccttactcgctttttttttttttttttttttktgagacaaagtctcactctgtctcccagactgccagactggagtgcaatggtgagatctcagctcactgcaacctccgcctcccaggttcaagtgattcttgtgccttaacctccctagtagctgggactacaggcccacaccaccatgcctggctagtttctttttttttttgagacagagtctcactctgccacccaggctggagtgcagtggtgcaatctcggctcactgcaacctctgcctcctgggttcaagtgattctcccgcctcagcctcctgagtagctgggattacaggctcgcgccaccacacctggctaatttttgtatttttagtagagacagggtttcaccatgtgggtcaggctggtctcgaactcctgacctcgtgatccacctgccttgggctcccaaagtgctgggattacaggcgtgagccaccacacctggcctttttttgtatttttagtagagatgggtttttgccatgttgggtcaggctgatctcgaactcctggcctcaagtgatccacctgccttggcctcccaaagtgttgggattactggcgtgagccactgcgcctacttgctttttttttttttctcgaggtagagtttcactctgtcacccaggctggagtgcagtgrcgtgatctcagctcactgcaagctccgcctcccgggttcacgccattgtcctgcctcaccctcccgagtagctggaactaaggcgccagccaccatgcccagctaattttttgtacttttagtacagatggggtttcaccgtgttaggatggtctcgatctcctgacctcgtgatgcgcctgcctcggcctcccaaagtgttgggattaaaggcgtaagccaccgcacccggccacctacttgctttcttagtcatgtgtctcatttatgtgtcctagctgggacccctggaggccctgcactggcccacaggccaggtcctcaggtcctctgaggggagaagagacattccaatggttatcccccgccttcagttcctggcctgtaatttacctcctccaaagagcctccctgacagacatatcttgccataaacacccagcatgtttccctacctgcctctcttttttttttttttttttttttttttgagatgggtgcagtggcgtgatcttggctcactgtaacctctgctgcccaggttcaagcgattcttctgcttcagcctcccgagtagctgggattacaggtgcctgccaccgcgcctggctaatttttttgtatttttagtagagacggggttttaccatcttggtcagtctggtcttaaactcctgacctcgtgatctccccaacctcggcctcccaaagtgctgggattacaggcgtgagccactgcgcccagccccccacctgcttctcactctgtcattgcactctgagtgtttgctcaggggagtggttctaagtctttatcggtctgggtagaggagtggagttggcaggagttgggagatggcacagagcacagttcaaatagaccatagtaggcgggcctctgaataataacccatagtgcacttgcagcctacaaagcactttcttttttcttttgttattattattattatttgagacagagtctcgctctgccacccaggctggagtgcagtggcacaatctcggctcactgcaacctccacccactgggttaaagcagttctcctgcttcagcctcctgagtggctgggactacaggcgtgaaccaccacacctaactaatttttgtatttttagtagagacggagtttcaccagagtttgaggccaggctggtctcgaacttctgacctcaggtgatccacctgccttggcctcccaaagtgctgggattactggcgtgagccaccacgtctggccttcttttattaattttttaaattaatagagatggggttttgcaatgttgcctaggctggtctcgaactcctgaactcaagcaatccacctgcctcagcctcccaaagtgctgggattacaggcgtgaggaatcacgcccagccacaaagcactttcacattttttaattttatgtgatgttcacacagccactgggagtcagggctaggattatcccctcataaaggtgaggacacaggctaagagagtcgaaggctggctagacaaggggagagacacagagctccgctgatcatcactggactctggattccaccaaacctttggaaccttccagcctcaggcctccacagcttcacagaaactgggcaagtcttaactctctaagcttctgtcttctcacctaagcatgtttggtactcacctcccagggtggttaggaggataataagggaatgtctcggcctacacgtaagtgcaccatcaatggtacctaaaaacgtcaacagttccagacactgtctccagagaaggctctgtgggggatgcggacatgtagcggccaagttcttgttctccaggggctctgcaggtcccttgcagaggaggcattcaatcctgccggctgtggcaggacactttcctatccaagggattggcttcctccgatgtagaacagacactatgaaatagctaccaacccaggggttgccaggaggccccatgaaggtcttgcactaataatacttcttgctttttttttttttcttttgagaaaaaaagcctgtcgcccaggctggagtgcagtggcgtgatctcggctcactgcgacctctccctcctgggttcaaacgattcttctgcctcagcctcccgagtaactgggactataggcacgtgccactatgcccagctaatttttgtgttttgagtagagacagggtttcaccatgttggccaggatggtctcgatctcctgaccttgtgatgtaactagtatttcttatgcccttattttgtgctaggcacagggcctcacccattattggcactcggtaaggattcgtgggattaatgagaagttaacctaaatcttcaccaaaggcccctgagcttcccctcgattcacatacaagggactggggctctgagaggtgggctgtgatgcgcccctggaagacccacgagtgggcctgcagagctgatggggagggttcaggcagggccaggggcttagaggagctgagattaacgtcgcccccctacccactgaccctctgcaggcgctggggctgtggagatccggagtcgccacagctcctaccccgcggggacggaggacgacgaagggatgggggaggagcccagcccctttcggggccgytcgcgctcggcgccccccaacctctgggcakcacagcgmtatggccgcgagctccggaggatgagtgacgagtttgtggactcctttaaggtgagcgccagtccccagcgtgccaggacctgaagtaccaggccgccccccgccggtctgtccctgccttgtcccaaggcacgcccggatctggagtcccacgacccctccccaaagccgtcctgttccttcctagctccagagcattctgggatttgtagtcacaagacttccccgcccccactccccagctcttcccccgcctggtgtgtgtgtgtgtgtgtgtgtgtgagtcacagggcatgctgggatctgtagtctagatcccactccaggcgtgtgtgtgtgtgtgtgtgtgtgtgtgtgtgtgtgtgtgagtcacagggcatgctgggatctgtagtctagatcccactccaggcgtgtgtgtgtgtgtgtgtgtgtgtgtgtgtgtgtgtgtgtgtgtgagtcacagggcatgctgggatctgtagtctagatcccactccaggcgtgtgtgtgtgtgtgtgtgtgtgagagagtcacagggcatgctgggatctgtagtctagatcccactccaggcgtgtgtgtgtgtgtgtgtgtgtgtgtgtgtgtgtgtgtgtgtcagtcacagggcatgctgggatctgtagtctagatcccactccaggcgtgtgtgtgtgtgtgtgtgtgtgtgtgtgtcacagggcatgctgggatctgtagtctagatcccactccaggcgtgtgtgtgtgtgtgtgtgtgtgtgtgtgctcacagggcatgctgggatctgtagtctagatcccactccaggccaaagctcctgggttccccgaattcttggaagaccaggcatgctggtatttgtgctccttgctggcacctgtgcgctctgtcgcccaggctggagtgcagtggtgcgatcacggctcactgcagcctggaactcctggcctcaaaggatcctcccgcttcaacctcccaaagtgctgggattacaggcgctcaccatcgctcccggccctttgattctcgaattgcggtctcatcttctgggtgctaggtctccagctctggcctttccatttagggccctaggcatcctctcttcccgtctccggcacggagttcctgggatctaaccagttcccattcctgggggcccatgcgtcctcgcgagcgtccctgaccgcccggcgtggagcctcctgggagttgtggccttcattatctcccccccgatctcacttagaggaaggctcacggaagtggagagcctggctcgagctgccatggtaatctaactcatgtaacccttttctccctccaccagaagggacttcctcgcccgaagagcgcgggcacagcaacgcagatgcggcaaagctccagctggacgcgagtctyccagtcctggtgggatcggaacttgggcaggggaagctccgccccctcccagtgaccttcgctccacatcccgaaactccacccgttcccactgccctgggcagccatcttgaatatgggcggaagtacttccstcaggcctatgcaaaaagaggatccgtgctgtctcctttggagggagggctgacccagattcccttccggtgcgtgtgaagccacggaaggcttggtcccatcggaagttttgggttttccgcccacagccgccggaagtggctccgtggccccgccctcaggctccgggctttcccccaggcgcctgcgytaartcgcgagccaggtttaaccgttgcgtcaccgggacccgagcccccgcgrtgccctgggggccgtgctcactaccaaatgttaataaagcccgcgtctgtgccgccgaggcttttctgtgcgtcgactggggctccggcaggccggggtagtgctctcacggatactttcaaaagaggccgctgtcttacgagggaaacttaggctctgcctgacatccagcgacagagacggaaggggtcgcggcggctcgcgggcctgggctgcgcggcccaggtccaagtccccagcacgcgcattgggaccgcagcgctgccggcagcccgatcccgcgctctgcaaaccgtgccgcggccccccagagagggtcactcgctcctatttgggtcagccctttccagcagctactgtgtggccggcccggggccagcgccgcccgggtacctcgcggggcgggagggagcggctgagccaggctggcagcagcgcggtcgctggaaactgaggcttcatgcggggacccggacagagcgggggctccgttccagaaagatttattggcgccccctataacccgggccggttcttggtgccgggcacagagatgcattgcgccacggccctgctcgcggaagctcccgagggcccggaatcggcagggcagtcagagagggcttcagggaggaggcagctagagctgcgaccggaaggtgaggtgagggtcatcccccccggcgcaaggaggagtggacccatggaaggacaggggagcagcagaggccaggcttctaggggctggaatgtcacacccagaagttagacattcagctggtatttgaggacctgggaactgacttggagtgtgtccctcagtggacaccagctagagtcaggaaggtgggagttggctgctgaggagcctagatacggaatacactggagtgagcagaactgggggatagggcagcgtcccacagaagaagtgaggaagtctggggccattgcattgaccctgagggaggagggccctactccggagcctgtttccctggcctccccaccccatctgtttgcctgaggctgcagcaaaaacaaagcaaagaagatactcaattggcaggagataagcccagataagaggccgccttcccctggaggagggatgcaggcgggcagcctgggaagagccaggaagctgggagaggccttgaagaggtgccaagccgaccctgctgcgagcccagccccgccctggagcccgcactgtgggctctctgccacttttcgctggtcttgaggcatgggacaggtccaggctggctgaagacagtccaccacggagggtccaggcctgccctgcctccaggtcaggacgtcttgacttagctgtggcctagcacacgacagatggctccgggcctcagtctcctcatctgtaaaacaggcataacatctccctcacagggatgaggggatgctgggtggcccagcccctgcgtgtctgtgactgtccacttcccttcccccagagtcacaggcaggcctactgcccacctatttctgaagacccaggtcccccggtgttgggcaggttctgagctgccctgctccaccctggccgatccatcacctgatagagtcaactgcctgtcgggggcccagagcagccccagcggaagatgctaggcgtttgggtcatatcaggccacaggaagcggggcagggaaggcttcctgaagcagaggcctgagcctcagaaaagagagaacagggagagcctcggagagacgaaagtcatggggatgggggaacaggaacagcggcttgggggcagagggcacaagcagaaggccacggaagctcagcagactcggcagggcaagctcaggttcaacccagcagcccttggctggaggcgtgacctcaaccccaccaaatgcccaaagtccattttatagatgaggaaacttagggcccagagtcctgtcaccccaaatcacactgcacacagggtccctgaaatccacttttattcatgtaaaaaaaatccccaaagaatagagaaaaaaatgtgactcctacttcccggagctccaagtctccagccagctctcccggggaagggaggagacgctgctagctcgagggtgtgggtgtcacagggagcaaagccctgaccaaggccctaacctaagactgagggcaggaaggaggggccccaggaggatgaagggagttagctgaggtacttgccccgggtttaaaaaaataaaatttctagataaaaagttaaaaaaaaaaaaaaaaagcattagtgtcattgcctcctgccctccacccagcgcccgccctggccctgtggccacctcgctcagccagttcagagctgcgtgttctcctcctggctctccgagtcagcgcccgacaggtgcccgctgctcccgggtgcgtgaccgttgctggcacaggccaccagaggcccgtcccccagcccctccggcatctcgcccagcaggctccggcggatctcctgggggagccttgcccgctgctcctgacactcctgggccagctgggccagcagctgtgggagaaggatgggcatcacaggcgaggcctggctgccttgcaccccgtctgcccacctgttcgcccatggcctcaccttgggctcctcttctgccagctgttgcaggacctgctgctgcccagccacaagacggtcatgccgctgcttctgggcctcctccagctacaggggtgggcaagggctcagctgaggggccctgagggaggggctagagcctcgaggctctggctgggtatagaagtcaggtgggcgaggccgggtgcagtggctcacatctataatcccagcactttgggaggccaaggcgggcggatcacctgaggtcaggagttcgagaacagcctggccaacatggtgaaaccccatctctactaaaaataaaaaaattagccaggcatggtggcggatgcctgtaatcccagctactcgggaggctgaggcaagagaattgcttgaacccaagaggttgcagtgagccaagatcgcgccactgcactccagcctgggcgacagagtgagactctgtctcaaagaaaaagaagtcaggtgggcgaaggctcccagggcaatgtatcagggttgtgagaggactgggcccaaggacgccaaagccagggacactggtacagacagttggctttgggtatgatgtgggtaccctggggctgttgggcacttgagaaaggccctagaagaaccttgagggcaacgtggcaccaggccaggcatggagatgggtgtctgatgagtgaaggaagggaggtggggtagggtggcccgggagcctgactcacccgacggatggagttgactgactcagtgatgtgccgacggttaatctccgtcagttccctgcacgggagcaacgcaggatggctcggggcccagacacctgccctgcctccccagtacccagatggcccccggtcccggtgcccttacgcctccttcttatgcttgtccctcatcttggcctccgagatgctgttatggcgctttctgtccaggatcttctgcagctccttcttctccctggagaagccggcaggggaagaggaggggtcagcggcagaagcacagactctgccctccttctggtactagaagtccccagcccttcccatagacaatcctcggctttcacctctcgttcatctctttcagcctcttgaactgagttgtgtttgcatcaaggacgacctccctgagccgctgcagagcctgtggacacagggagctgacaggtgatgccgggctgacgacgggtctatccagcaggctttccctggccactgcaggccccctacctgtctcaggtgttccagcctccgctgggcctctgcgtccacctgggcctcccgcagctccagcaggctctgcacctgtctgttctggaactcctgataccgctttgcctcgtcctccccctccttcgtgtcctccacatcagcggccccacctctgcgaggagaacccctctgggtgatgcctgggcccgtcacatggactgggatggggagggtgtgtaggggggcacatcctggcaagcgatggcagacaccatcccatggggccaggtctgttatgcaaaccaggaggcctgttagctccacccaagtgatgggagcctgtttgggcaacatgctcctcatggacttcaaaagagatgtcactccctgggggacacagggacgcctggtgtggaaagcctcctccatccttgcactgaaccctcctccctgggggtcaaggagcagctcttgccatctctccatgcccaccgacccccatgttcacatcagcacacccagcacacatagcacacaggcggcccagacactcacagggcacctggccgcagccggcacctgccctcagcctgtgcctgagccaggccatccagcaggcggcgggtgagggtgactgccttccgctgatgcttcttgcgcagctcccgcaggtctcgctcttgccggctccggagcttgaccagagccttgtgacctcggagctcatccagcggggtgggggccacctctgggagcggcagagcaaaggtgggcggggggtgggggaacctccaaggcaaccccctgcctccaggtaccccgccccctacctgagaggatgctggcgatgagatcatcacgctgccctggggagcagaggccctgtgaggagctggaggacagggtggggggtgcctccctgcagcccacccccgacccaggccactccttacctgggctgctgagggaggtgctggcaggggaggtggtggggccagggggccggcggggggaggcatccagtgggctgggggtggggtttgaggacggctgagaccccagctgctgagactgggtgtcctggcacgtctcttggccagcctgagcctatagggagaaaggagaatgctcttttcagaaatgctgttccctccagacccttctgtcctctaccacctcctgggtcccctagcacccctgtcagcctcccttagtccaagccactgctggactgctctgtaacaggaggctgtctgcatgagaagagctataaatcaagcctttctaaaccccttttccacatgggctgtggggaagataacataatgccagcccactgcatgtgctcagtaactcccagattgttctggaaaggcctggcccagccccaagcctcctctcctcccctgcctgtgtcccccagccttgcctacagtcgctcattttccttgctgctgagctcctgattaaatcaacagaggactcaaccgcagagtgggcaccagcctctccgctaacagctccaggcagccctaattgcagtcatctctccccgcccgcctgccgcaggccctggggggactggatctggaagcgcaggtgaacctccgtgcctgacccctccccacggaagccactgccctcctcatgactcccaggacaccacgtctgaacagcttctgtggcttcgcactgccctgatgaagtggctgagacccctgtacccccactccaagcctacatggagctggaggaattccagcccaggtgtgacctgaaggcctcctgaatgcaaatgggtggttttcatctcctcaaaatcccagggctgccaagcctactgcgctagagagaccagaagccccctcctcatgtggccacagcagtcatgtccagcggccccctgggtcacagtgagcctgagccctgccctgccccggctcacctcactctccccaatgagggcggccagctgccgggccctctggtccatcaggctgacgtgcttaatggggttgatcagggcctccgcatagtctggggggaggcagaaggccaaggtctcagagacagagcccccaggccacccccacccgccacctctggtctcaatgaggaattccagagcttgtcctcagatctgttccctactcagttccctactcagtcggggccatccagctcggccactcccaggccctgggggtggcccttgtccctcacactc

SEQ ID NO: 97668 - DNA, 67969 bp, Homo sapiens
gaagcagagacacaatgtgtaaaggccctgtgacaggaagctggaagggagctgaagaaggtcattgtaactagagcacgaggggcaagatggagagtggcatgtgatgtgacagacatgtgcacaggtgccatgttgtgcagggcgttgctgactgtgttaatgatgtggagtttacattaagaccagtaagaactggccgggcatggtggcttacgcctgtaatcccagcactttgggaggccagggtggccggatcaccaggtcaggagatcaaggccatcttgaccaacatgatgaaacctcgtctctactaaaaatgcaaaaattagctgagcttggtggcgcgcacctgtagtcctggctactcaggaggctgagacagcgagaatcacttgaacccgggaggcagaggttacatggagccaagatcgtgccactgtactccagcctggcgacagacagggactccatctcaaaaaaaaaaaaaattcaatgagaagcactggaagcttttttttttcttttttttgacagagtcttgttctgtcacccaggctggagtgcagtggcgcgatcttggcccactacagcctctgcctcccgggttcaagtgattctcctgcctcagcctcccgagtagctgagactacaggcgcgcgccaccacacctggctcatttttgtgtttttagcagagacggggtttcaccatgttggccaggatgatctcgatctcctgacctcgtgatccgccagcctctgcctcccaaagtgctgggattataggcatgagccactgcacccggcctggaagctttttaagcatggggtgacatgatcagataggtgtttttacttttactttttttttgagacagcgtttcactttgtctcccaggctagagtgcaagtggtgtgatcttggctcactgcaacctctgcctcccaggttcaagcaattctcctgcctcagcctcccaagtagctgggatcacaggcctgtgccaccacacctggctgatttttttgtatttttagtagagatggggtttcaccatgttggccatgctggtcttgaactcctgacctcaggtgatccacctgccttggcctcccaaagtgctgggattacaggcatgaaccatagcgcccggctgatttttacacttatttatttatttattttagagacagggtgttgctctgtcgcgcaggctggagtgcagtggtatgatcatggttcactgcacccctgaattcctgggcgctaggggtcctcccacctctgcctcccaagtagctaggactacaggcatgcaccaccacatctagcttttaaaacaaaattttttttagagatagggttttactatgttgcccaggttggtcttgaactcttggcctcaagccatcttcccaccttggcctcccacagtgctgggattacaggcatgagccactgtgcctggccagatagatgtttttaaaagattactttcttttttttgttttgtttttttgagacagaatttcgattttgtcacccagtctggagtgcaatggcacaatctcagctcattgcaacctccacctccagggttcaagtgattctcctgcctcagcctcctgagtagctgggattacaggcgtgcactactttttgtatttttaatagagacgaggttaatttttgtatttttagtagagacggggtttcaccacatcagccaggctggtcttgaactcctgacctcaggtgatccatccacctgagactcccagaatgctgggattataggcgtgagccaccgtgcccagtcaaaaagattgctttctaaagaatgaatacataggggtaagagcagactctgaatctccccattcagagaggccagattggaggctactataggaggtcaggccagagaatacgacggcttggtcatgatagcccctatggaagtagaaaataaatggataaatctgagaaatacgcaggaagttggcagaatttcgtattcaaatggattcaatgtattcaaatggatacactgagactgaaggaagtgctatttacagagctaggtaatatttttggaggggagaataatgagttcagtgtgaacaagtagaaattcaggtacctggagagccaccaaagtggctctgtccattacagagtcggatatagaggtttagaactcagaagagaggtctggactggagatacaaatctaggaactatatagacaataatggaagccataagctataatgacactagagggtggcactggaactcactgatgtccttggtaagagaggtctctattgcgtagtgggaggagaagccatataagtttgtttttttaattgagatggggctggtctcgaacgcctggcctcaaatgctctttccacctcggcctcccgaagttctgggattacagtgtgaaccaccgcactgggccagtcatgtgagattgagcagtggaatgaatagaagctgaggctatgtagacagaaacagacacagttaggaagactgagtgcagtggctcatgtctgtaatcccagcactttgggagaccaaggtgtgagagtcacttgagtccagggatttgagaccaacctcagcaacagagtgagacctggctaatgttaaaaaatattgttttttgtttgtttgtttttgtttttttgagacagagtcttgcactgtcacccaggctggtgcaatctcggctcactgcaacttccacctcccgggttcaagggattctcctgcgtcagcctcccaagtagctgggattacaggtgcccaccaccatgcccggctaattttttgtatttttagtagagacagggtttcattatgttggtcaggctggtctcgaactcctgaccttgtgatccccctgccttggcctcccaaagtgctgggattacaggtgtgagccaccgcgcccggcctaaaaaaatattgtttttaattatccaggtgtggtggcatgcaactgtagtcccagctattcgggaggctaaggcaggaggatagcttgagctcaggagtttgaggctgcagtgagccataatcataccactgcactccagcctgagtgacagaatgagaccccttctcaaataaattaattgaaataaaaacaaagttaggacatttcgggcagaggagcagcatgagcaaacacaaggagacacaaaaaagtggggtgtgtttgggggacttaagctaatcagagtggctggagacttgagtatgtaagaggaaggaaaaatgaagacagcggtgaaaatggagacgctgaagtgaacagccttgaatgcaaaggacaagagaaaagaaaactgctatttctggagtgcctcctatgtcgtaggagtttttgcatacattatctcacttaatcctgatgtgtaaggtaagccctctttttttttcagagacaggttctcactctgttaccctaggctagagtgcagtggtacaatcatcgctcactgcagccctgaacttacgggcttaagcgatcctcctacctcagcctcctgaatagctgggattacagcttgagccaccacacctggtcaatgtaagcattcttatcctcatttattccactgaaaaaatagctgttcagagaagttaaataatttccccaggatcacatatctttttttgtgtgtgtgagatggagtcttgctttgtcgccaggctggagtgcagtggcgccatctagcctcactgcaatctctgcctcctgggttcaaattattttcctgtctcagcctctcaagtagctgggactacaggcgtgcaccaccatgcccagctaatttttgtatttttagtagagatgaggtttcatgatgttggccaagatggtctcgatctcttgacctcatgatccacccgcctcggcctcccaaagtgctgggattataggcgtgagccaccgcgcctggcctaggatcacacatcttgtaagcaacgcgattccaatctccctctcacacaagaggatctgggtaagtcccctgccaggtggtgacatcaagtggggagaacagggtgagaatcccttttatccagcgctgtagtgtcagatacattagcctaagcagagaaagggtattcaaaacccaaagccgaatgcaaccagaaaatagttgaagaactaaaggctccatccagaaatcatgttgtgagagccaagaggggttagtctacggagccaaaaccccaccccgtaattggtccaaaagccatgttaatcataagcagtggagcttaatcaaggagagggtggagggaggccagggagcttcagaagcgggcaagctctcagctaagtctcaagcctctagtccagctcacgctaaagttctgggatggggaagagttaaggaggtaaattttgttgagttggaaaactaaacaattgggtcctctagaggataacatgcttggaaatgttttgtggaaagactcttctggtgcctctgtgaagaagggtctccaggtttcagataacagcacctctcaatctggttctcatatggagagtaaggacagacagcttgggctcagtccacagactcaactgccctctgcagagtggaccatggataggactctggcttggtccttggccttgtggaattacactttatttgtatcctacaggaaaaaaaaaaagattaagactcccatagaggaacaccaagcacagacatggtctatccaggatactcaaggaagcaggagctgtcaggcaatccaagccagggcaggacttctcatggtacagtacttcatgattcattatttcatttgagcctcccaaccattccatgaagtagttgttaattatttctttcccgcctcgaatttttaaaaaaataaatgaggaaactaaggctggagcaaggggagtgactgctcaaagccactccattggatggccatcagaactggaacttcaatccaggttttgtcttaggtaaattctgtgcctctttcactatagaaaaaaaaaaattgctaagggaaggcttcgtggaggaggaggtgcttgaactgcccaagtggcagggcactaagtgccgaagggtgaccaggcctctgggcaaaagcacaaagatgctgcacagcaaagccagttaaagaaacaaaacacggttccgggaatgtgcactgcttgaggacaggaaggacccagatcctagaatggggcctggggctcagcaggcgctggataactgaagaaatggctgtctggaacacagatttttctatagaggagtagtggcggtgaggctgcgaaggcggaagatggagaggctttcacacaaggaaggcggtggaggaggagcgagggggctcccgggtgcttgtgcggacataaggtgcgagagaatcagctggaaggtgggctccagcagagagaagaggaaggccagaagtagaccgggacagggggaggaaaggacagagtcaaggaacatttaggagttcggttcccggaggcctggcgacaccctgacggggaggggtgacgcgcacccatttgcaggcagaaaggcaggagcaggggggtgtccgaggatggtggctcggagggaccaggcataggtggtgcaagctcagcagtcactcaaggggtggcatgcggatgagggaggcgcctcccggactgggggaccgggaaaggcattagcaacctgccagaacccggttaacaaaggcaggactacaattcccggcatgctcgggctcggtggggtgacggcgggcggtggctgcgctgcacccgactggtgggcgcaggacctgggtcggcaccggagcctgtcatcccggagcggtcggcgggggtgcagagacggcgatgcgcccctgtcccccgcacccgggccgctccgggctcgcgcctcccgccccgcggccccgccccctgccccaccccagtcgggaggcttagctggggccgcagcgcggcggcaacatcactctcgctgccgctgctccgccccatccccttctgtttttctctctcattctccagtggcggcggcggggaaggcggaggcagaggcagcagcagccgcgctggctssaatgaatgatcccccagcttggggggaggactccaggtgagcctctgccctcgggaggcccgggacccccggccgcccacgaccggcagcccacgctatggatccctagaggaaggaggagaagacagctcgccgcccacccccatcccattttcctcttcctttatctcattgttgccgaagctgtttacggcagcgctccctctgctccwgcatggggcgggctccgggcacggctgctcggcaggcgctgctcccgcggcgactgggggattctgcctaattcacctcccagccggygcagagaggaccggagagcggtggaggcccggactgcagcagcgytggggccacctcccagcgtccccaccctaggaggctgcatgcggattgaagagctgcgcctgggggctgggccggccccgctgatcccgacctagcgagcaggatagcaggaccgcccaggctgcggaggggctcgggggcaggaaggtcagagcagcaagatggccagtaagaccaaggccagcgaggccctcaaggtggtggcccggtgccgccccctcagcaggaaggaggaggctgctggtcacgagcagatcctgaccatggacgtgaaactgggccaggtgaccctgcggaacccccgcgcygccccgggggagctgcccaagaccttcacctttgacgccgtgtatgatgccagctccaagcaggccgacctgtatgacgaaaccgtgaggcccctgatagactccgtgctccagggtttcaatggcacggtgtttgcctatggccagacgggcactggcaagacctataccatgcaggggacctgggtggagcccgagctgcgcggggtcatcccgaatgcctttgagcacatcttcacccacatctcccgctcccagaaccaacagtacctggtccgggcctcctatttggagatctaccaggaagagattcgagacctgctctccaaggagccgggcaagaggctagagctgaaagagaaccccgagactggcgtctacatcaaggacctctcctccttcgtcaccaagaatgtcaaggagattgagcatgtgatgaacctggggaaccagacccgggctgtgggcagcacccacatgaatgaggtcagctcccgctcccatgccatcttcatcatcactgtggagtgcagcgaacgtggctctgatggccaggaccacatccgagtgggcaagctcaacctcgtggacctggctggcagcgagaggcagaacaaggcaggccccaacacagcgggaggggcagccacaccatcctcgggtggcggtggtggcggtggaggcagtggtggtggtgctggtggagagaggcctaaggaagcctccaaaatcaacctctcattatctgccctgggcaacgtgattgctgccctggcgggcaacaggagcacccacattccctaccgggactccaagctgacccggctgctccaggactccctgggggggaatgccaagaccatcatggtagccacactggggccagcttctcacagctacgatgagagcctctccaccttgcgctttgccaaccgagccaagaacatcaagaacaagccccrggtgaacgaggaccccaaggacacactgctgcgggaattccaagaggagattgcccgcctgaaggcccagctggagaagagggggatgctggggaagcggccccggaggaagagcagccgcaggaagaaggccgtgtccgccccgcctgggtaccctgagggcccagtgattgaggcctgggtggcagaagaggaggatgacaacaacaacaaccaccgcccgccccagcccatcctggagtcagccttggagaagaacatggagaattacctgcaggaacagaaggagcggctggaggaggakaaggcagccatccaggatgaccgcagcctggtgagcgaggagaagcagaagctgctggaggagaaggagaagatgctggaggacctgcggcgggaacagcaggccacagagctgcttgcggccaagtacaaggtaagggccccagaggagctgggcactcgagatgtccccgcaggggatcccggcaaggaggctcttctttgagagtctgtgacctgscctgaagtggaggttctccctcagcaccgcacactgccctcctgccaaatgtgcccccagagcagccaggcaaattgctgtgataccgggctgccaggtacatgcacaggcacacacacacgaagcaacgtggacaggcggtctctcaagccagtgagcttggggtggtctgacctgctgtgggcatttcctgctggtggcctcaggatcagtcaggtctgtgggatggccaggcagcctcttgtgaatgtgggttcttgttccttcacagcctcctcccctgaggcttcctccctctgcagcatcttcaaacctcacgtcgttttaataatatcatttggttagtgcttcagttcaaaaaatgccccatatatatgatccatacatgatctcattggatcctttggccatccagggtcacagttctgaaatccccatttcagaggtgaggaattaaagcttggagaagtgacgtgaccaaggttccatcctatgaagtggcagagctgagctggaacccatggacctcatgctgtttcagttcttagctgggcaaagtgggaccatgaacagattctgctccctgggaaaatggtcccctggrccttacagtgcaggagccattgcttgctatcattaggaaagagatttgggggttatgcaggaggtagggtggaaaaagcaccaaactctataccagagaccaagagactggcctagccattctacagctcattgagtggccttgtgtaagttgcttctctcttttctcaggcctcagtttacctttctgtaaaatagagggttggcctgggtgatctctgaggctctacctatctgataattctatggcctatattaatctgagcagcaarccaaccgacccctgccccgaggcctcatcacagttaatatccaattccccataaccctgagagatgtcaggacctcagcatccttcctgagctgtttcctcacccccgggaccttccaggctctaatggggctaactacagaggcccctccctgtccagtcatagacctattaagttgcattgctgaggatgccacaactcaatgttccaggcatttccaggcccctggagccttcaacactaggggtggaaggaaggacacaggaagccatgagcttgctgggaagagcaaaatattgccatttcttattccttctcaggaatgtgggctggggagcaggggggcccagcctacagccactgggagagtgacagatgagctgtatgccattgtctgttttgggaatgtgctgctgcagcaggggctctggccttacatatttaatatttaattcacttctttgagcccaggaagagttatgctgagctgtttcctcaaggaaaggatcaggggcctggaacctttagggacatcctgagagaagcaagatattagaggcagggccgttagattgaagccctccctaggagggagggaatccagtgtttgcttacctggtcaatctgccattgattttgctaagaagaccccccacctccctgaaagctggaaggcaacaaaggctaagaagggaggaaaatgcaataacacacttcggctgcctgagggatggggtgaaggtttccgttgttgggaactgaccagtttccctcagtgagatccttggatctaaggcagtatggggcacagatgatagaacggccaagagatcagggcggccagcaccagaattcttgcaccagaggcatagcccacaaaatmtcacagtcttagagttggcaggagctttggaaaactgagacctggacttgcccagggccacacaggtgagttgaggagagcctagcccctttatatatggaagagcccagcctctttccactgcttgagtcctaatgttacctgtgctacttgataatcagagtaattcatttttatataaggcgttgacatcttaatctcattcgatcctcccaacaaccccaaggggtgggtactattatttccattcaacagttatgaaaactaaggctggggaggtggagtgagtgtcttatcagctcgtgaccctgggtgataggcagcagagccaggactggaacccaggtcttctgatgcccccagccctgtgctctttccaaggcatctcagattcctccatgtttgctcactgtgtgactcagggmaaccgcctttccctctccagccctcaggcttccattcacctaatgaggaggagaagcctgaccttgctccctggggagtgggtgaaacagtcactatgtaccaggtgttcagatggaagcaaagggggaggagtgcctgggaaattccacaacaggaatgattccataccctgtgacttctcatcacactcagcctaggacaatcagcagccagcaacccaaaatggaacctagacagaggacccaagttccccatagccccaaggcaccgcctggttcagtgtcggatgtttctaggctggtggaaacaatttgagggctcttgaggaatctacagggtaaagaggggaggagcatgttagagataccaaccccagtcctgcctatttcccagggttgaggattaaatgagatcattagcacgagggcatttaaaataagttgaaagcaccaaatacatggaaggcattagcagctatggggtggcttctgtccaccaagctggggtccagtgatctccaggacagacatctttgttgttagcttgacttcttctttaccctgccatcccagctgccttgccataaccctgcagcttgctgggagtagagccaggcaggagaggtctaggagatttcagaaggcaggctccccatctgcagctcactcctgtcccccctttctgagttatggcatcaactccgcttcttccctgaccagctcccattcccttcttccagttcatgccaccctctgggggcagctaagtggtagttgatgcgacccagtgccctcattcactctctctgactcatctcatagtctgtctcgccagctctccctgcctgccacctcccaggctccctgttctctttgttctcccctcactgtgcacaaacaccatgcctgtctccttggaatctcatttcatccctcctttcatgtttactgtgggcctcaggggatgttcgggtgtgcaaatgtgtgagagtttgtgattgtgatcagtgtcctgtttatcagtaatcattagcaatttatacttatgtagtgtctgggggagggagggtgtgggcgggaaatgctggtgggagcttgataacatactaggcctgtgaggtaggaggaataggtaacatcacagacccacaatgcacagtgaaaacttcaaatatttggtactgcgcagtgaaaacccaaatatttgtgcgcagtatacatactgcagtgaggacaggtgaacacaygtagattggttgggagaaggcctactttattcaaatgtaatcatgcaagacaatttttaaatgactgctttaattttgaaattaactttttttttgagatggartttcgttcttgttgctgaggctggagtgcaatggcacgatctcagctcattgcaaccctgcctcccgggttcaagggattctcctgcctcatcctccctagtagctgggattacaggtgcccaccaccatgcccagctaattttttgtatttttagtagagacggggtttcatgaggttggcaaggctggtctcgatctcctgaccttgtgatttgcccacctcagccttccaaagtgctgggattacaggcatgagccactgcatctggcttagttaattttttcaaggagttggactagatgattcctaaaactttgattttagctacttaaaggaaaaaaagagtgtttgtgtacagatgatacagaatgcaggcacgaattgaagacagaaacaacagcatcggatgtgatccccaataagaaggtctggagggagaagagctggggttcttggctggagcccactctctctgtggtgaatgtagaaaagagaacctgcagaagcagccccggaagccagagggatgcggtcataaggaggaatgcgaactgtgttgaaattgtattgtcccttttgtgggtcctgctttctcccacccctcagcagggggattaaccataaatgcaagagagaatgtttcaagcctgagcgacaacagtaacagtaataataatgacatttactgagcacttgctttgtgccaagtgctatcctatatacagattatctcgtttattccacatgagcaccctccaagaaaggtgctgttattgttcttgttttttttttgaggcggagtctcactctgtcgcccaggctggagtgcagtggcgtgatctcggctcactgcaagctccaccttctgagttcacgccattctactgcctcagcctcccgagtagctgggactacaggcgcccaccaccacgcccggcttactttttgtatttttagtagagatggggtttcaccacgttagccaagatggtctggatctcctgacctcatgatccacccgcctcagcctcccaaagtgctgggattacaggcctgagccactgcacctggccttattgttcttgttttatagatgagaaaacagagctccattgaggtgaaataactctcccaaggccacatggttggtatagtaaaactatgtaaacccagctggatttgacayaaaatctgatgctcttttaggcttaaaaaattaggaatatcaggttgggaactggttcctgaggaggtgctgaaaaattataggagtaggctgggcaaattataggagtaggagtggctcacacctgtaatcccagcaatttgggaagccaaggtgggtggattccttgagcccaggagttccagaccagcctggacaacatggagaaaccctgtcttgacaaaaaatacaaaaaattagccaggcatggtggtgtgtacctgtagtcccagctacgcaggagactgaggtgggaggatcgcttgagcccaggaggttgaggctgcagtgagccttgattgcaccattgcactccagcctgtgtgacagagaggaaccctgtcttaaaaaggaaagaaaagaaaactgataggagctgctgtagatgtgtcacatttgaggtgacagagtccagtgggcagctggagttgggccagtggagtttagaaagaagcccgagactggaaatggagattgggtctcattttttttttttttgagatggagtttcacttttgttgcccaggctggagtggaatggtgtgatcttggctcaccgcaacctctgcctcccaggttcaagcgattctccttcctcagcctcccgagtagctgggattacaggcatgcaccaccacacccagctaattttatatttttagtacagatggggtttctccatgttggtcaggctggtctcaaactcctgacctcaggtgatccacctgcctcagcctctcaaagtgctgggattataggcatgagtcaccatgcccagccctgcccctctatttttgacactctatccctctgtgtaaatgactcccagatcgaggtctcctctctggtctctctgctggccttattatatgaagtgctatgttcagggcatgggcatcagagtcagccaggtctggatttagtgacttaccagttctgaggcctctgagtaccagtttccttagctataaaatgggatagtaatagtatctttgttacagtgctattgaaataattaaacaagggccaggcgcagtggctcatgcctgtaatcccagcactttgggagacagaagcaggaggatcacttgagcccaggaattcaagaccagtctgggcaatatagcaagaccttgtctctaggaaaaaaagaaaaaggccgggcgcggtggctcatgcctgtaatcccagcactttgggaggccgaggtgggtggatcacgaggtcaggagactgagaccagcctggacaacatggtgaaaccccgtctctactaaaaatacaaaaattaggtgggcttggtggcgcgcgtctgtagtcccagctgctcaggaggctgacgcaggagaatcacttgaacccgggaggcagaggttgcagtgagccgagatcacaccactgcactccagcctggtgacagagtgagactccgtctcaaaaaagaaaaaaagagaattaaacaagagaaygaacataaagcactttgcacagtttctggcacacaagtgttaagtaaataattattattgctatgtcaaaccacctaatagatgttttcacttggccaccttcctgatatattaaacacatcacattttagtttggcattcaaggcgcttcagagtctgactgcaatgcatctcttctatcttgcctgcccaagccggttactccaataggaaaaccctgcaccagctgttctaccccttcctttgaaatcaacatgggcctccctatcctactgctgattgcactgtttttgtgtcctggattgttgctggtaaccagggagtacgaattatggaagcaggttaagcttaatttaaagatctctttaacagttaaaattgggctgtttcaagaagaaataggtggccttgatggtggtgatgatttcacggttgtatacctgtccccaaattcattgagttgtatacattaaatatgtacagctttttttttttttttttgagacagagtctcactctgttgcccaggctggagtacagtgggacgatcttagctcactgcaacctccgcttcccgggttcaagcaattctcctgcctcagcctcttaagtagctgggattacaggtgcacgccaccacacctggctaagttttgtatttttagtagagatggggtttcaccatgttgtccgggctggtcttgagctcctgacctcaggtgatgcacccacctcagcctcccaaagtgctgggattacaggcatgagccaccgtgcctgacctaaatatgtacagctttttacacatcaatcatgccccagtaaagtcatgggctcccatccctggaagtgttcaaggagagaccgaatgtcagtggtgcactaagggcttgatatatcagaaaagccgttgaaccagatgatcttcagaatccctttctcttaaaggcccttaattgtttaaaatgttattttttaaacagtaaaagagaaaatatttagctttctgaaaattaagaccagaagatttaaattttaatgtagtatgaattcaaacaataatataatagaggatgtttttcagctctctgtcataaccagttagagaagagtcaaagacaatgggaagaagagaagagagaaagagagagataataggagaaaagcaagagagaaatagagggggacaataaagaggggaaagagaaagaggtggggaggtagagtgggtaaagctgtggacgacagggtttttgggaagaagaaacctcgattgggagaggaagtgctgtagtggagagagtgaaatactgtgtatcattccactgtcctgatcttaatgttagtcttcaaatagggctatctccagtctccagagacttccacaaagctgatctggttccatccacatgtccccaaggacaccagccccatgctagacactctgagatttgtggggctgtgtgatcagctgagtcctgtatgatcagacccttgaaagaagccttgagataacaagtgacccatactccaggctgggtttggatccaggtcacagtccatgacctcttggtgttggtgagagcagtgtcttgtattccttctcatccctggtgggtgtggtcagttaacagaatcgttgcgtcctgggggcattttgtaacacaaagatttgactagtgggaagtatatgacactaatggatttccatatgagattctgggcttcaagtgacattgaggctcagcaggccttttggtccagtgttaggtttctcgtgctatgtgttggctggaggagggtattatcatactgccctgagtcatttccagcctccgcagagcacaagattggatgaagtggctttgacaatattctcattgtgctctgaagactaggaagaaaggcctggaattcagatagagaggggcacttttctctgccagcccactgcgcctggccagtctggggcacctcttctggagctgctgaaccaggtggcatgtttgaatgaataaggaaatgcttccccaggtgcagtggctcatgcctgaaatcccagtatattgggagggtgaggtaggaggatcacttgaggccaggagtttgagaccagactggacaacaaagccagaccccatctctacaaaaaagtaaaaaaaaaaaaaaaaaaaaaaaaaaaagctaggcatggtactgcatgcctgtagtcctagctgctcaggaggctgacatggaaggatggcttgagcctaggagttcgaggtttcagtgagccttgatcttgccacsgcactccagcctggacaacagagcgagaccccaactcacaaaaaaagaaaatgaaacaaaatggtctctctttccacagatccagctytgcagctatagaggctgtacaaggcacaccctcatgctcagaccttataggacacccacacttgtggtttggtatatcwagaatttttaatatcctgagaagttcctgggcattaactccacctcatactaaaaaattactttctagttgtctcactttcttcccagatatactcaacagaagagtcccaggccctgggctgagctatttcttttttctttttcttttttttttttgagatgtagtctgtctctgtcaccaggctggagtacagtggcgtgatctcagctaactgcaagctctgcctcccgggttcaagcgattcccctgcctcagcctcctgagtagctgggactacaggtgcgcgccaccacgtcctgctattttttttttttttttttttgagacagagtcttgctctgtcacccaagctggagtgcagtggcrtgatctcagctcactgcaagctccgcttcccagcttcacaccattctcctgcctcagactcccgagtagctgggactacaggcacccgccaccacgccaggccaattttttgtatttttagtaaagacggggtttcaccatgttagccaggatggtctccatctcctgaccttgtgatccgcccgcctcggcctcccaaagtgctgggattacaggcatgagccactgtgcccggcccttttttttttttttttttttttttccttcatagagacagggtttcaccatgttggccagggtggtctcgatctcctgacctcatgatccacccgcctcggactcccaaagagctgggattacaggcatgagccaccatgccctgccgggctgagctatttctatagcactagctaatgtacatgcagggtttctcctttcttcaggtgggccagcagaaaaataacaacagtggtggtaataatgatagctaccatttcttccatgcgtgcttaatgccaaccactctgatgtgttcttttttttttttttttttttttttgagacaaagtttcactcttgtttcccaggctggagtgtgatggcgtgacctcggctcactgcaacctccacctcccgggttcaaccaattcttctgtctcagcctccagagtagctgggattatagtggccaccaccacacctggctaatttttgtatttttagtagagacagggttttgccacgttgaccagactggcgccgaactcctgatctcagctgatccgcctgcctcggcctcccaaagtgctgggattataggcgtgagccaccgcgcccggcctgatgtgttctgatgtgttctttatgtgtatcattttgcttcatcctcacggtagcrtgaatcttcatctgactagtgaggatactgaggcacattaaggaatgaacattccaagttcgcacacctagaaagtggtagggccagagttacgagcccatgtctgcctgactccataacccatgatcttcacctccacactgtaatgccagctcagacaggaaggatttatgccagatccctgactaataagccccagtgggaactcttgtctcctgagatatttaactcatctttgtccttctgtatgatgcaaacccccagcttctaacctcagcccagcaccattcgttcgtataatcaacaaatctttggccgggtgcagtggctcacgcctgtaatcccagcacttcgggaggccgaggtgggcagatcacttgaggccaggcattcacgactatcttggccaacatagcgaaaccctgtctctaccaaaaatacaaaaattagctgggcatggtggcgtgtgcctgtagtcccagctactccagaggctgaggtgggaggatcacttgaatccaggaggcagaggttgcagtgagccaagatcacgccactctcttgcctgggcaatagagtgagactctgtcttaaaaaaaaaaaacaaaaacccaacaaatctttttaagtaaccatggccaaggacataaatcagtaggtatagttaacttcatctttaaattctttaaatttctggaaggaatcataagaactcgcaataatggttattgctagggattttaatatggaggggaatttttatttttcactttatacctttttattttatttttcacaataagcatgtaatactttaaaaagtcatctgggacttttttttattttttcaaaagttttgggggaacaggtggtgtttggttacatggataagttctttagtggtgatttctgagattttggtgcacccatcacccacttttaaaaaattaaacaaaaattaatctgaattttttaaaggaaaaagccctttgtcagggttctatgktttaaaaaagacgggggggacatataaaagatatatgttaatgcctagttggaagatttgcttaaaggtaatgaataattgaggaaaatccagggttgataataatgctcaattatactcagttattggtaatcctgtgaccttggacaagtcactttccctcccaggagctgtaaggaatgaccaatagatgattcctgaccggacgcggtggctcacgcctgtaatcccagcactttgggaggccaaagcaggcagatcacctgaggtcaggagttcgagaccagcctgaccaacgtggcgaaaccctgtctctactaaaaatgcaaaaattagctgggtgtggtggcacacgcctgtaattctagctactcaggaggctgaggcaggagaatcacttgaacccggaaggcggatgttgcggtgagccgagatcacgccactgcactccagcctgggtgacagagcaagactctgtctcaaaaaagaaaaaaaaaaaaaagatgattccttgctttctgtaccatttgctgattcaccttggaagcaggccagggttagaaaccagcctgagtgaaggacagtgaaggacagagaggaatgacccagccttgactgggagcctagaggctgtgtgacccaggaccacgaacctaacccctctgggccccgcacctgatctgtaaactgctcagactacaytatatatatccttaggttcatccagttctgacactggaacattctgttgtctggatttgctgaagagaaaccctctagaaagtcacaaataagcaagggaaatagggcggaaaggtgaagataagcattgatctgaggggctcatggttttttcactaaagtagaagggctgattagtttccttcctgctttttttcaaggtgagctgaggcacttctgggcatccttgccttgttcagtttaaggctggtactggagtccagctcgcctcatcccttggccaatagtttcctgatctcaaattgttctttcttcttgataaggaaattcctagcacttgaaccattcgtcatttttgttgtgttttgagccatccaaggcggagactcagactcagtctcctgatttttgtctcccagggaaggatatcattgaaaatagcattattcatctgaaaatggtactcttcatcccctccccattgtctctttcatttcttcttcccttactgctgactcctcaagatgtacaatcagggcgctggaaaaggagaaataggtctgtgarggaaggggtggctatattttctaagagatggaagcggggtctgttgagattgttgttttggttttgctttttgtggcaagtggtgggtaaaataccaatgagataccgaaacagcgagtaacgactaccatttgggtgtaatttatcacttaccaacactttcacatctattctcaaactcgctggttgttttgttttgtttctgttttttgttttgttttgttttttgagacagggtctcactctgtcacctaggcaggaatgcagtagtgcaatctcagctcactacagcctccacctcccgggctcaaggaatcctttcatctcagcttcccaagtagatgagattacagagatggaactacaggcacacaatactacgcctggctaatttttaaaataaatgttttgtagagatggggtctcactatgttgcccaggctggtcttgaactcctggggtcaagtgatctgcctgcttcagcctcccaaagtgctgggattacaggcgtgagcctctgcacccagcccaacttgctgttcttacccaaggcctgaaaggtagcaggtattctccccattttacagatgagaaagtggaagtccaaagggctgaagagctaggttttgtagcaaagagagtggcagagtgtgtagcccgactggagcaccctgactcccacacccagccacctttatatcattccaccacagaacttgtgcaggggcccttcccacaaatattttcccagagtttttagcctctctctgggactctagggatcctgacaacctccctgccagcacacagttaagagctctaacccacttatctcagagacccccataagactctcacacaggcagaagcagcagcagcagagccctgcctatttcagccaaaagagaaagcaaggaggctctgagctttcctgatggttcctgagttggcaaaggtacaaataccaaatgctgcttctctccaaggtgctttcctgtctgaacctggaagaaagccatggaacagagaaaaggacattgggcttggagttagggcggtggtggtcaaatatcactctgccatttactggctccaaaccttgagcaaatcacttcgcctgtctgggccttagttttcttttatgtcaaatggggatcataaccattatctcataaggttcttgtgagcatcagataggacgattaaggtaaaaaggagttaacccagttgaggcacatggccagttgcatctgagactcctgtctcctgcggaatgtcacagataggtggcagtggcagggcagagcctgtttggcttctctgtccttgtaaaatcatacttgatgctatctttccagaagagtggctggctgggcctggctgtctccattctagctttccacgtcagtgctttatgagtactggggcctcctttctccccgctctggttttgcactccatttgctcctggaatagttaaaggtgagtctctgagtatccccggctgtgtctacaagctggcattgtccctgtagtgacctggctgttgtcacagcagctgacctgcctctgatacctggaatcagagccttagtcaaattgggaagttatttggaaagcacatagtcaatataagagcagctagacaggtggggcgtggtggctcacgcctgtaatcccagcactttggaaggtcaaggtgggtggatcacttaaggtcaggagttcgagaccagcctggccaacatggtgaaaccccatctctactaaaaatgcaaaagctagctgggcgtggtggcaggcacctgtagttccagttacttaggaggctgaggcaggagaattgcttgaatccaggaggcagaggttgcagtgagccgagattgtgcctctgcactccagcctgggtgacaaaatgagactgtcttaaaaaaaaaaaaagagcatctagacagattccttaattaggagactcaggcttcaaggactccacttctaggcctttgtttcccatctataaagcatgggggttggggttgatgattcccaaagtccccttggttaccctgcccttcatatccatctctcaagtgagagactatggtgccctggagctcccagccctgtcttttccacccccacagcctgtgctggccttttagttacactggacttgtttagaatcagcagaaccaaacccaatcctgtccccaggcccacccacctatagtcttttgctctgaaatattacaaaagaagcattgactggaatggctgagagcttcagggaagttctcttgaagactaggaactccacattctcatgtcctctgcttggtatattctagactgaattaggctcagggatttcaggcatccctgtccctccctatcctcataggtgatggttaaggatagagatctctaaaaaaattagtcgggtgtggtggctcatgcggctatttgggaggcttaggtgggaggatctcttgagtctggaacatccaggctgcagtgaaccactgcactccagcctggacaacagagcgagatcccgtgtctcaaaagaaaagaaaaggctcaagatctctgagagaaaggaggagatggccactggtatcctcagacaaatgtggaaataaaaaagtaaaggaaaaaaatctatttctaagccaagaaaggaatctcatgcatgacatatttccgagcatgggagtgaagcagacagcwtggggtgagactggggagaaggagggagcagagaccctgcacctggactgaggcccacccacagatttcatgccagagccaaccccatcttcccagcacaagactggtctgtcagccaggcttggctgagagtgtgggtttgagcaagtgggcaagacttggccagtgactgataaggcaaattcagttgacattcagaccacgtctgtgctgggtcccggcagggctggcagagaaacacaggggcattggacagacgggtggagtgatagtggccagttagtcatcgtccaggattctctttatggagcccagggcccagcccgcaggagagattgtgaagcagagttctaggtccacagaggagatccaacgcggaagcagatgagcagaaaccagcccaggagctggtcttgagactcctgtaatggggaagagggaggaaggagggctgggacttggggactcagcagtcatgcttggctaatgcatcagaccccaggcctgactggcagctcaaattatgcctgatagtgtccaggtggcttcaagaactgggtgagttggtagcctttgagtgagaaggacttgggcctaggtgtggatagctggggaaggtggaggctgaataaacaaaaaatttcattttgaatctgaggtccatctcttcacttgaaaatcaccaaaaaaattagccggcatgctggcacatgcctgtagttccagctactcagaaggctgaggtgggaagatcttttgagcccaggagctggaggctgcagtgagctctgatcatgccactacattccagcctgggcaacagagcaagaccccgtctctaatggaaaaagaaaaatcaccaaaaagtttttaaaaacacaatatagagtatgttgggaaaggaaagctcaggcctccacaaagaccaccttaaaggtatggagaatataaaatgaatgcagaggctcgattttatatctattattataacaaatgtttatttttattttattttatttattttatttttgagacagagtcttgctctgtggcccaggctagagtacagtggtgctatctcagctcactgtaacctctggcgattcttgtgcctcagcctcctgagtagctgggattccaggtgcacgccaccatgcccagctaatttctgtctttttagtagagatgagattttgccatgttggccaggctagtctcaaactcctggcctcaaatgatgcacctgcctaggtctccgaaagtgttgggattacaggtatgagccactgtgcctagccataacaaatttttaaaataataatacttcatgcggagccagggatggtggctcacgcctgtaatcccagcactttgggatgctgaggtgggcggatcacaaggtcagcagtttgagaccagcctggccaacatagtgaaaccccatctctactaaaaatacaaaaattagccaggtgtggtggtacacatctgtaatcccagctactcaggaggctgaggcaggagagtcgcttgaacctgggaggcagaggttgcagtgagccgagatcacgccactgcactctagcctgggcaacgaagtgagactctgtctcaaaataataataataataataataataataataawaataatacttcatgcctatgatgctgtaataaaaatggttccattatttactgctggcagtagtttaagtcattagaatgataattgacaatatgttccaagatacacaaaatgtttataaccctttgtcctcttctgaaattcctttctaagaaagtcacctaaaaaagcaaaaaattaggctgggagtggtggctcacacctgtgatcacagcactttgagaggctgaggcaggtggatcccttgagccagcctgggcaacatggcaaaaccctgtctctacaataaaatacaaaaattagccaggcgtggtggtgggtgcctgtggtcccagctactcaggaggccaaggcagaagaatcatttgaacctgggaggcgggaggtttcagtgagctgagagtgcaccactgcactccagcctgggtgacagagtgagactctatctttaaaaaaaaaaaaaaaaaaaaaaaaaatatatatatatatatatatatacacacacacatacatacacacacacacatatatgcatatatatacatatacatgtatctatgtacacatgtatatgtatatatatgcatatatgtgtgtgtatgtgtgtatatatatgcatatatgtgtgtgtatgtgtgtatatatatttatatatttatatattatatattatatattatatatattatatattatatattatatattatatatattatatattatatattatatatattatatattatatattatatattatatgtattatatattatatatattatatattatatatattttatatattatatatattatatattatattatatattatatattttatatattttatatattatatatattatatattatataatatatattatatatataacatatattttatatatatattatattatatatatattaggtaaagtggaaatagcaagacataagcttgtgtttatactatgtccatagaggtgaaaaaagggccaggcacagtggctyatgcctgtaatcccagcactttgggaggctgaggtgggtggatcaccataggtcgggagttcaagaccagcctgaccaacrtggagaaaccctgtctctacaaaactacaaaattagccgggtgtggtggtgcgcgcctgtaatcccagctacttggaaggctgagacaggagactcatttgaacccaggaggtggaggttgcgtgagccgagatcgtgccattgcactccagcctgggcaacaagagcgaaactccgtctcaaaaaaacaaaaacaaacaaaaaaaaaccagggaaaatgaaagaaaccaagtagccatggtagggaatatgtggcatttgtcattttatttctttggtgattttgatgtttgtgcaattctttttttctgaaaggagagaaagacaataaagggttaaaaacgtgtccccagaattctttaatagactggtatttcctccagggttaactcttgaagtaacaaatttcgtaaatgtattaccttctataaacagtaaaactccttttcgtttgtcctaaaaactgctgctgtcaaacctcaagacgtgagctcttactctatgtgccaggatggattggaaaagcctggatctttccttttcatccccagttttgattgtttcatttccagacttatcctcttaacttttctttgtcttttcagaacagagtcttttttttttttttttttgagatggagtctcattctgttacccaggcaggagtgcagtggcacgatttcagctcactgcaacctccgcctcgggttcaagcgattctcctgcctcggcctcccaaagtgctgggattacaggcttgagccactgcgcccggcctaagcctcccttctcttgatcttctctctgctttatgtctctggagatgcagtaagagaactacacacagtactcccaattcagccacatcatggttttatatgagggtacaatgttttgtttctaaaaagccttcatgatggtgcctgggcagatgctactgacttttttagctgtggcagcatattcagccagtgtcttctgggaacagtggagtgttactcctcctcctcctcccctttttagggcttataattgattgcccatggctatcatttaattagtagagttaggattccttttccccaaaatgtaaaattgtaattgatgctcatctgccattttttgtcagctcacataggctagaaattctgttgtactttaccacctaggaggatttgggggtgtctgtgaagttgggtatttcacccatgcactccttcttgcacagcttcagagattagtcctgttgtttcacacttgagtgctttccatccagagaaatacctgtttatttctgtttcctttccctagttcacttcccctttctccatctcttcactccccatgtaactttgaataacctctgatgtgcagccttgccaggagtgctttaacctccagagttctggtcattggcttccccatgtgctgtaataacctattccgtcccattctgaaagaactctcagagattagtcagacaccatttcctcttgccggaaacatgttgatttcctttagcaggttctgcttcctaaaggagtcaccacagcccctgcaataggaagagcttgggctttggagccaggcaggcctaggccaggtctccatttaagttttttgtttttaattctctttctttttttgagacagggtctcactgttgcccaagctaaagtgcattggcgcaatctcagctcactgcagcctcaayctcccaggctcaagtgatccgcctgccacagccttgcgagtagctgggaccacaggcccacaccaccatgcctgacccatttttatattttttatagagacgggttttgccatgttacttgggctggtcttgaactcctggactcaagggatctgcccacttcagcctcccaaagtgctgcaattacaggcataagccatcctgctcagctggatctccatttaaatttaatgagaggcatataactatcatttttccagtgaaagctcacagatggttatctgccaagcagtgtgctaagtccagggaccctgagatacgagtaagatatgattgctgtcctaagggagcttacaggcgagagagcatgtaaacgaataatgattctatcatgagaaatagtaggaatatggcctggttactgagggggccatcatgtgaccttggatgggttatataacctctgtgagctttcactggaaaaatgatagtgctaataatatgcatgccccttacaccagtccttttcagacatttatgtgcatccaaattacctgggaatctcagtacaatatggatctcaattcactagrtctgaatttcttatttgatttgcttatttatttttgagatagggcgttgctatgttgcccaagctgatcttgaacccctgggctcaagcgatcctcctgcctcagcctcccaaacaatggggaccacaggcataagccaccacacctggctctggagtgttacaaaatctccccaggtgtttctaacatgcagygatatttgagagcaagtgtcttttgattataaagaataaagaatgctagagccacataaaatgctggggaaaatgaagggtctcagggttgaaatggacaagcgtgtcccagattcagaggccaggccagacagcaggctcctgaagacctgtgacccagtagttaggggatcaggtatccatggtccacaacagtaggggcctcctccatgtggttcttctcttttctctcacacccaccccacccctcctgccaggttccccagatgatcgggccccatgacagtgagtgtggattgatgaatgggaggagaaactgggataaagagagcccaaggtggccgggtgcagtggctcacacctgtaatcccagcactttgggaggctgaggcaggcggatcacttgaggtcaggagttcgagaccagcctggccaacacggcaaaaccccatctctactaaaaatasaaaaattagctgggtgtggtggcatgtgcctgtagtctcagctacrtgggaggctgaggcaggagaatcgcttgaacgtggcaggtgaaggttgcagtgagccaagatcgcgccactgcagaaaaaaaagagagcccaaggaagggacctggaacccactctgggacaacccccaaggattctgtttggttcatcaaatacgtattgagcacttgttatctgccaagcactgagctaagtccagggacccagagatatgagtaagatatgactgctgccatgagggagctcacaggggggacagcatgtaaatgaataattattctattatgagaaatagtaggaatatggcctggttactgagggggcccgaaagagcaatttcaaggggatcagggaaaatttcccaatggtcaaggtgtgtcttgcagaaaaagtggcagttttccagttagatgtggagtgggaggaggaacccaggtgcttgtgaaatgccatggcccattgagggagctggaattcttttttttcttttttgagayggagttttgctcttgttgcccaggctggagtacaatggcgtgatctcggctcaccacaacctccgcctcccgtgttcaagcgattctcctgcctcagcctcctgagtagctgggattacaggcatgtgccattatgcccagctaattttgtatttttagtagagatggggtttctccatgttggtcagactggtctcraactcccaacctcaggtgatccgcctgccttggcctcccaaagtgccgggattacaggcgctagccaccgcaccgggcccccagggagctggaattctcttggtgaggctggagtacagagcatacgcagagcatgaatagtaagaggaaccgggaggccaggccagctcccggggcctgtcactgcagctgaccttggatttcatcctgtaaggaatggaggtccattcagtagtttgaagccaaggagcaagcattcagagttgtgctgttttttgttttttgttttttgtgatgaagtctcactctggcacccaggctggagtgcagtggcgtgatctcggctcactgcagcctctgcctccctagttcaaccgattctcctgcctcagcctcctgagtatctaggactacaggtgcacgccaccacacccagctaatttttgtctttttagtagagctggggtttctccattttggccaggctggtatcgaactcctgacctcagatgatccgcccacctcaacttcccaaagtgctgggattacgggcatgagccaccgtccccagcccagggttgtgtttttagtggatctgcctgggtgtcatgtggcagaggggtggaaggggacactgaggcagtggggagaccacagcagtggtccaggagagttgtgggggctgcaatgaagccagcaggtagcagtgagaatgaaaaatggggggtggtgggagccgcactgaggagcagatttgatggccttgactcactggccagatgcaacggatgagaggcagggcagggatgaggcgaggcaggtgagtcgctgaggatgcagtgtaagggattcttccctctcatggtcctgcaaatgctgacctggagtgtgaaggaggagcctaggatgggtttaggtctgtggcaaggcratgcggtaagaggggagatcattaaccaggagcgcaggcggctgcagtgtggcagcatggacagcctccagggctcaaggcctcttcctcctgccttggcctctgaggctgtgtggggctggaatgaagctcgtgcctctctggcgggcccaacttgctcagcgtctttgggtgacaaagcctcacacagcccattccttgacctcccaaaagccactgttaacccctgtctggctgtgttcccaatgatgtggctcttacaggtggtctcctgctccccaagtctgacagcaccccctgctttgagatccctcaggtaggtcagctgtttccactgggaaaaattccagtggagaagcagccagctttttccactggttcaaggtgatttcaaccttccaggaggcccgtgatgaagccagaggacaactgggtaccctgggacagcaccttcttcttattttattttcattttctaaaatttcaaatcgggcacccccccaaaccagaataggttttgaaaggctgccgacagcaccctcttgaaaatacattttatgtagtcacagtttacacaaatctgacattatttcagcttcagattccaaagcactgactaggggctttcacagagtgagactgggggtacgaggttcaaatctctcctctttgctactcaatagctgcatggccttaggctggtcattctcaatgtcttcatttattaaatgcggaggagaatagtccctcttagggggggatggaaaccatggtgttaaaggcttagctcagcatctaatagatacttagcgctccrcaaatgtttgccagccatcctggaacataggcggtgttccaatattgtagatgacagacctgaagggattaatttgcccaaagcctcgaggtaagtgggtagaaccaagtcttcccggccctctccaaagctcctgctgtgctgggcccgtgctgttccttcttgctgtgcagtctgctccctttggcttttcttctgctttccacatcagctgaagatttagaccctttcctgctgcctgtgttgagagctgtcttcctgagttggaagccagttagctaaaggctgggctacctggtgactgtatcttatctttcccaatcctcaacaccagctgggtcctggttgccaggattaggttgccacccccatcctcctcctagccctggtggaccaacctttcctgtgtacccaaagcaaacagaycagttgccctagattccccgaggggcrccctctgtgcctccctagtgttcctgctgacaataagagccttgtgctgggacctgagacactagaggggaaaactccattctccctgaaagcyacaaggccccatctgggacacatctggtgtccactcccagaaggaccacagagcagggaagcaaaatctctccagctagcaatgttgtggaccctttgcaaagcccacctcccaacccctctgtgtccccaggccatggagagcaagctcctcatcgggggcaggaacatcatggatcacaccaacgaacagcagaagatgttggaactgaagaggcaggagattgccgagcaggtagggcctccaggtgccaggtccccttggagagtgtggcctgcagctcatgtctgggaggtgcagggccgtaaaccatggtggactctggatctctggaattacagtgctgagaatctcagacatgccaccctgggtcccacaggtctactagcccagggtcttccctttggcaggggcactgctagctggtgggcragaggacgtgatagctctccataacatcagcctccacaagccacctggtactaattcctgggccttccacaaggtggtgtgagttctttgccaactgtatgactgtttccctaaatcatcaagarccacagtttgttggtcttaccaatcaaccattatactacttggggagagggtgaggcagcttggaaggcagtgtgatgtgcctccatctgtgtgactaacgcctctggagtaggccagctcttaggggctggggtctccatccacatggggcagagcctggyaaaggcatgrccctgggaactgagaggagggttcccaggggctctgcaggattgggtgggagcagtggatgtgggccatgggccatggtgaagccaggtcccgagacaggcagagtgagccagtcccctgagctttcctggccctcccgagtatgcactgctcctttgagccacactgcccgtccttggcctagaaacgtcgtgagcgggagatgcagcaggagatgatgctccgggacgaggagactatggagctccggggcacctacacatccctgyagcaggaggtggaggtcaaaaccaagaaactcaagaaggtgagacgctgcagcaggaccggttaaggtgtgctggaggcccagcagtctctgcccaagggatgtgtgcttcagggactcctccccatttggctggaactgctgaacccctgagtgacatggcttggcctcgggggtgagcaacagggggaggcaggaggcgggggctgggggtggagtagagccttttctcctgggccagggtgggctatgacaggctgcaaactctgtcacttgcagtatccagcgttaccatcttcatggtcctgggtgattaccccgttcagtgtcaccagtgagtcacagttgggatagctgggcctggagcagggccaggggaatacagagaggctgaggaggagactggaaccccgggaagctcaggtggggagtgtaaggccctcaaggacatgtcaagggatgagaatagccgctcaccagaaccctgcaaagcccgtggcaagggaaagacatgtacatgtgaggggggtctagggcaggaagcagcaaagctctagcttggattctgggaaaaacctggaggcccttcggggtgggtgatgtggctgcccaggggcaggcctggcagaggcactgccactgtggcagttaccacggacccagccctcagtggctttggagaggagcaggatggccatgctacctccacaccccacttttgagagcccctgaagagactggagtgggaggggtcaccttccaaactcgttcaggcttcctgcttcctgagctgggtctccaaataagccccgggtcctagttccggctcttctattggctggttgtgtgaccttgagcaagtctgtgcctggcttcctcatctatgaaaggagggtattggaccaaaaggtccctggggtcccctcccgtttgaacattccacgatgctgatagcagctgagaaagagcagacaatggtcacaggcctcagtgaaggagggcggggcaccactttaaatagcccagcccaattcgtggtgggttgggcacagcggggagttcagaaaaggacccgcagcctcatcctgggctgagtcggtagactctgagcctgcagccctgcggcccaggctgggtgacyggggcctcgttgccacaccaagcagcctctgagtggcacctgtccccacccagctctacgccaagctgcaggcggtgaaggcggagatccaggaccagcatgatgagtayatccgcgtgcggcaggacctggaggaggcgcagaacgagcagacccgcgaactcaagctcaagtagggcccgcagctcttttcatcccgggtccccacagccagccatcattactcaggcytctcctcccctaaggcctcatcctgactgtctcctctcccatgagtcctttaggaataaaatgcgtctgagggctgagggatgggcccacgtgctggagtttcttctacctcctctgcctgtatttgatkaacccctcaaaatggacgctaggtgctggccaaaagtaactccgaaggccctgaggctaccatctttgcataagaatcagtgattttaaattttttaaaaattatttttagggccgggcgcagtggctcatgcctgtaatcccagcactttgggagccgaggcaggtggatcacctgaggtcaggagtttgagaccagcctgatcaacatggtgaaaccccatctctactaaaaatacaamaattagccgggcatggtggcgcgcacttgtaatcccagctactcaggargctgaggcagaattgcttgaacctgggaggtggaggtggcagtgagccgagatcatgccactgcaatccagcctgggcgacagagcgagacaacgtctcaaaaaaaaaamaaaaacaaaaacaaaaaaggccgggcgcagtggctcatgcctgtaatcccagcactttgggaggctgaggcaggtggatcacgaggtcaggagatcgagactatcctggctaacacggagaaactccgcctctactaaaaatataaaaaattagccgagagtggtggcgggcgcctgtagtcccagctacttgggaggctgaggcaggagaatggtgtgaacctgggaggcagagcttgcagtgagctgagatggagccactgcactccagcctgggcgacagagcaagactctgtctcaaaaaaaaaaattatttttaaatttgttttaaaaattattttaaaaaatgtgtgtatatagtagttgcatatattaatattgatgggatacattagattttttttttttggagatggaatattgctctatcatccaccctggagtgcagtggtgcagtcttggctcactgcagcctccacctcccaagttcaagcggtcctcctgcctcagcctcctgagtagctgggactacaggcgcccaccaccacacctgactaatgtttgcatttttagtagagatggagtttcgccatgttggccagggtggtctcaaactcctgacctcaggtgatccgtcctcctcggcctcccaaagggctgggattacaggcatgagccacctcgcctggccacatgagatgttttgatacaggtgtgcaatgtgaactaagcacatcatggagaatggggtatccatcccctcaaacatttatccttcaagttacaataatccagttacactctttaagttattttaaaatatacaatttgctggcttatacctgtaatcccagcactttgggaggctgaggcaggtggatcacctgaggtcgggagtttgagaccagcctggccaacgtggtgaaaccccatctctactaaaaatacaaaaattagccaggcatggtggcatgtgcctgtaatcccagctactcaggaggctgaggcaggagaatcacttgaacccaggaggtggaggttgcagtgagctgagatcgtgccattgcactccagcctgagcaacaagtgcaaaactgtctcaaaaaaaaaaaaatatatatatatatacacacacacacacacacacacacatatatatacaattaagttattgactatagtcaccctattgtgctatcaaataaaagtatttattcatttttctaattttgtgtacctgttagaagcagtgatttttcaagctgcagtatttctgtagggatcctttccccttaacttcttgattttccccacctccacattgcctctgcctctttttttaaaataaataaataattaattaacttatttttttttgagacggagtctcactctgtcgcccaggctggagtgcagtggtgtgatctaagcttactgcaagctctgcctcccaggttcatgccattctcctgcctcagcctcctgagtagcttgggactacaggcacccaccaccacgcccagctaatttttttttgtatttttagtagagacggaaatggtgtttcactgtgttagccaggatggtcttgatctcctgacctcgtgatccgcccgccttggtctcccaaagtgctgggattacaggcgtgagccaccgtgcccagccccctctgcctcttggcttgttgcttctaatccttcaaccctcacatgcaccacgtggtctctcgctcacccattttcccatcactccttcattcctgctcccaggtacctaatcatcgagaacttcatcccgccggaggagaagaacaagatcatgaaccggcttttcctggactgtgaggaggagcagtggaagttccagccactggtgccagccggcgtgtgagtctctaacccagctgtctgggctrggggacttgtgggtccactccaggtcggggctggtgaggggcctgaggccttgcctgcagggagacagatgttttgtggattggggaaaagatggggaggatgccgatgggggatgaatttctcaggatctaattgtaggggtctctatgatggaagggtgttctgggaaaaaaagtgtctcattggcctgggatgcagaaaataccttgtgagggatctcgggagggaggaagagcatctcagcctcttgacaatcctagcgaatgctaacatctggccaggtctggtgaatattcatttgtcagatgcccgaaatagcaaccacagttaatatttgccaagcgctactgtgtgccggatgctgtgcaagactcaggagacagaagataaattagacatggtccgagctcacagtccagtgggaaataagtaatcagatcatgatgtgatagagctgtgatccaatctcagtgcgctcgctcatccgggtgatttcagcatttccacctgtttccatgtcctagtccttgggtgcagctgcggccattggctgggtgtgtggctccctctgctggtggccatgaagaacatcccaacagagtgaggccttgcccggctgaaccatgggcccttaattgcaaatatatagagagaggtgcttaggaggctggacaccaatgcaccttcctggagattatttgctctctctagaatattaatgttaaaatagggcaagagtctccctaaatctgggatgggaagctagcaagaggtctacagcttctcactgaagcatcagatgcctacttggttattttttttttcctttcttccttttcttttcttcttcttttttttttttttaacaactatagcttagatgcctatttgatctttcttaaaggctgattttacttaaggtgataccacataagtttgtaagtggcaagcacgtgaatagaggacttttcaatggtattactttgcacctacaatccacctttccaatctaggtagagattctcaatagtacatcagctgtcatagaggttttccaccctggctggagctagaatacctgcagagagtctgatttaaagggtcccaggtcttaggttttgtgaytctgcatttgaagccaggctagaaaaccactgctccaatgacatttgctggagttggatgctggcgaggcttcactctgaagggttatcttatgcttagaaaagttctttctagctgggcgtggtggctcaagtctgtaatctcagcactttgggaggctgaggcaggtggatggcctgaggtcaggaatttgagaccagcctgaccaacatagtgaaaccccatctctactaaaaatacaaaaaaaaattagctgggcgtggtggcaggcgcctgtaatcctagctactagggaggctgaggcaggagaatctcttgaactcgggaggtggaggttgcagtgagccaagatcactccattgcgctccagcctgggcaacaagagcaagactccgtctcaaaaaaaaaaaagaaaagaaaagaaaaggtctttctgcygggcatggtggctcatgcctgtaatcctgtaatcccagcattttgggaggccgaggcgggtggatcacttggcgtcaggagtttgagaccagcctggccaacgtggtgaaaccccgtctctactaaaaatacaaaaaattagccgggtgtggtggcatgcacctgcagtctcagctcctggggaagctgaggcaagagaatcacttgaacccaggaggcagaggttgcagtgaaacttgctctttcgcccaggctggagtgcagtggtgtgatcttggctcactgcaacctccgcttcctgggttcaaacgattctcgagcctcagcctccccagtagctgggattgcaggtgcatgctaccacgcctggctaattttttgtatttttagtagagacggggtttcaccatgttggccaggctggtcttgaactcctgagctcaagtgatccacctgcctcagcctcccaaaatgctggaattataggcatgagccactgcaccagtccttagaaaagttcttgagtttaaagtttgcaggtgaaggaatttctttacattggatgtagtagtgccaccaatgtgctcaactagttgtgggatgggagaggctttgagaaggtgtgcattaacttttgttgttgttgttgtttgagacagggtctcactctgtcaccctggctggagtgcagtggtgtaatcacagctcactgcaacctcagcctccccaggctcatgtggtcctcctcccagctaatttttttttctttttttttggtattttttgtagagacagggttttgccatgttacccaggctgatctcgagctcctgggctgaagcratctgcctgccttgtcctctcaaagttctaggattacaggcgtgagccactgcgcctggccacgtcagctttttattttgaaaacaagaattgcaagaatagtataaagaattctcgtatacccttcaccagattattaacattttgccatatcttgctttaactttcccccaaccacttgagattaagttgcagacattttgaccttttacctgtacttccgaaaaatgagaacattcgtgttccacagtgcaatgatcaaactcaggaaattttgtattgtcacaatattattatataggcaatattaaaatttgccaatgtcctttatgatgatttccctccctccccacctgcagtcatgcatttcatttaattgtcatgactctttggtctcctttaatgtggaactgagaagggattttgacttgagtttagcagtttcttgcttcagaggaatttattcatttctcaaaacactctgcaattttgacttgactgcctcaagcacatgatccagactcaaagtgtggcaggtgctttacctgaagttcgaatgagctttctgcataatgattatgaatttccttccctccctccctccctcccttcattccttccctttcttctttctttcccttccttccttccttctttccttcctttctttctttctctctctctttctctctttctctttctctctttctctttctctctctctttctctctttctctttctctttctttctttctctttctccctttctttattttcttccttacttccttgcttgctttcttgctttcttttttcttgagtctcactctgtcacccaggctggagtatataactcactgcagcttcgggctcctgggctcaagtgatcctcctgcctcagccttctgagtagctggggccacaggcatgcaccaccacaccagctaaattttttatcttttgtagagacagggtctcactttgttgcctaggctggtcgtgaggtccggggcttaagcgatccccctcctactgcctcccagggttgggatcacaggcatgagccaccccacccagcctggacttcccctccttatttatgttatttatttatttgtattatttttgagacagagtctatctctgtctgcactcaggctagagtgcagtggtgtgatcacagctcactgcagccttgacctcctgggctcaagtgatcctcccactcagcctcccaagtagcttgaaccagcaggcagtcgccaccatggccagctcattttttcttaaatgttttttaaaagtttgctttcttccaccaggtgttcatgcctgtaatcccagctactctggtggctgaggcagaaagattgcttgagcccaggctattgtaagctaggatcatgccactgtactctagcctgggcgacagaatgagacttcatctctaaaatttttttttaatttactttcttccttttaagtaacccttacttcaattgcaaacaatgttttcattatggaaaatttaaataaacatagaaagaatgaaaattccacctagctagtagtagtgtttactaacaattggatttgaactttccaccatcttttctttttttatacataaacttttctccttttgagggttaaaatggtttgtatatgctgaaaaaaaccattcacagattttaaaaattaaaatagctaccttaaaacagcatactttaattaatttttacagtaatacctataataactttttttttttttgagrcagtctcgctctgtcacccaggctggagtgcagtggcgctatctcagctcactgcaagctccacctcccgggttcacgccattctcctgcctcagcctcccgagtagctgggactacaggtgcctgccaccacacccggctaattttttgtagttttagtaaagacagggtttcaccatgttagccaggatggtcttgatctcctgacctcgtgatctgcccgccccggcctcccaaagtgctgggattacaggcacaagccactgcgtcgggcccctgtagtaactttttaaaaagaaagaagcttgctagaatacagatctttctttattgtgtaaatgttgccaatttctagcccattgtcttttttaccctgatcttctgctttaaaggcaagtttgtgctctttattaaaggattctaatgctctctgctcttgttgcccaggctggagtgcaatggcacaatctcggctcatttcaacctccacctcccggattcaagcaattctcctgcctcagcctccccagtagctgggattacaggcgcccactaccacacttggttaaatttttttgtatttttagtagagacagggtttcaccatgttggccaggctggtcttgaactcctgatctcaggtgatccgcctacctcggcctcccgaagtgctgggatacaggcgtgagccactgcgcccagccttctttctttttttttttgagatggagtctcgctctgtccccaggctagagtgcagtggcgcgatctcggctcactgcaacctccacctcccagactcatgtaattctctagcttcagcctcccgagtagctaggattacaggtgcacaccacgacacccagccaagtttttgtttttgtttttgagatggagtctagctctgtcgtcaggctggagtgcagtggcgcgatcttggctcactgcaacctccgcctcccgggttcaagtgattctactgcctcagcctcctgagtaaccgggattacaggcatgtgcctccacgcccagctaatttttgtatttttagtagggactgggtttcaccatgttggccaggatggtctcgaactcctgacctcgtgatctgcccacctcgcccaccaaaatgctgggattacaggcgtgagccaccatgcccggcctaatttttatatttttagtagagatggggttttaccatgttggccaggctggtctcgaactcctgatctcaagtgatccgcccaccttggcctcccaaagtgctgggattataggcacaagccacctcacctggcccccacctttcctctctgtgattcttcccactgtccttgagcagggaaagttgtgaaaagagagtcagttctttgccagtggaaacctggaaaactctgatttttcctcagaagctatttgctttatttttatttattttattttattttatttattttttgatacggaatctcgctatgtcacccagactgtagtgcagtggcatgatctcagctcactgcaacctctgcctcccaggctgaagcaattctcctgcctcagcctcctgagtagctgggattacaggcacccaccaccatgcccggctaatttgtttgtatttttggtagagacggagtttcgccatgttggctaggctggttttgaactcctgacctcaagtgatcttcctacctcggccttccaaagtgctaggatttacaggcgtgagccaccgtgcacatccaaaaactatttgctttaaatttacctccatagtgttaagttgtattattttgctgttgttgttgagatggagtctcgtctgtcacccaggctgcggtgcactggcaccatgatagctcgctgtgttgcctgggctggtcttgaactcctggcttcacgctaatcctcccacctcagcttcccaaagtgctgggattacaggcaggagccactgcatgcaactggccttaaattttattctttttttttttttttttttttttgagatattctcactctgtcacccaggctggagtgcggtgacactatcttggctcactgcaccctccgcctcctgggttcaagcaattctcatgcctcagcctcctaagtagctgggattacaggcttgagccaccgaacctggccttagttttatcctttgtaaagggactacccagaccaagaattattgaacccaggctgcagctgtgaaaggacaggatttttaactaccagactataaagtagagcagcttttatagtgttttcttttccaagattctttgcaaagaattagtcctaacacacactcattatgcccattaatttaaatctgcatatagttgcttccactttgcatttgtaagtttgtgttggcaactcttctaaatgaataccaattggacagtgttcccttaaattttttttttttttgagatagagttttgctcttgttgcccaagctggagtgcaatggtgtgatctcggttcactgcaacctccacctcccgggttcaagtgattctcctgcctcagcctcctgagtagctgggattacaggtgcccgccaccacgcctggctaatttttgcatttttagaagaggcggggtttcgccatgttggccaggctgatcttgaactcctgacctcaggtgatccactcacctcagcctcccaaagtgctgggattacaggcgtgagccacagtgcccggcctccctgaaattcttatattgaaaatttaaagctataaatagatttacaaggttttccgaaattatggttaagtatattcataacttaaccatgctattttatgcagaatatgtttgtacctgttcagaataaagaccaagtacaacatatgtgaagaaaatatgcaaatacatctgggtagggtaaaaggcaattataggctgggtacagtggctcatgcctgtaatcccagcactttaggagactgaagcaggtagatggcttgagcctaggcatttgaaaccagcctgggcaacatagcgaggccccatctctacaaaaaaatacaaaaagttagccaggcattagcacatgcctgtactcccagctacttgggaggctgaggtgggaggattgcttgaacctaggaggttgaggcttcactgagctgtgattataccacttcactccacctggcctggtcaacagagtgagaccctgtctcaaaaaaaaaaaaaaaaaggcaattatgatttaccaatgttctctactacacttaaatacaaattatatgaacagtaattacagaatgctctaatataataaagaattccaagaaataaattactttaaaacagttattaagaaatatcaggtagctgtgcacggtggatcacacctgtaatcccagctacttgggaggctgaggcaggggaattgcttgaacctgggagacagaagttgcagtgagccgagatcatgccattgcactccagcctgggccacagagcaagattacatatctatgaaaaaaaaaagaaagaaagaaatatcaggtaatcatgaatatattcttttctttttctttttcatttttttgtcactgtccactttgctatgtctgatgactgcaatttgcagtatttaatatttatttcagaactttaaaaaatacaaaaatagaaaaggcaagtaaaaaatggttctaggattttttttttttttagatagaattttgctgttgttgcccatgctaaagtgcaattgcgcaatcttggctcacccctacctctgcctcccaggttcaagtgattctcttgcctccgcctcccgagtagctgggattacaggcatgtgccaccacgcctggcaaattttgtaattttagtagagacggggtttctccatctctactctccatctccagcctgttggtcaggctggtctcgaactcccgacctcaggtgatccgcccacctcggcctcccaaaatgctagtattacaggcgtgagccaccgtgcccggccagttctaggattttttatatgaaacaagtttttaaaattactctttttaaagccaagataagatggttagaataaagtaaaaacaattccacggtaattgaaatcccagttgtgattctgacttagcagagagagtctggtggggcacagtagggggcagggagctgctggcctggatctctgaggtcatctgccccatgtccctcatttcaccacagaaggttgagggcagggaggtccttgaacaaggcagctttcctcatttcaggaaccatggggtctgaggctgcagctgtgaagcaaacttctccactccccagagaaaaggtcctttcttcagcattggatcccaccacttgccgcatcacttaattagggctaaaaaacaaacagaaaagttatttctctccaaagcatatttaactaattagggcgttgttccatttgctcaactcaagtgtggaatattttgctttatttcggcctgtggtattctggggatgagaacactaagagctgctcgaagtgagaggaaaaaacattgtttgtaagaaattacctgaagtcatgctgtcccattagaaagcttctgttcaaaaaacattcttcctccacctactccagctctaagcatccatcccaccctctgaccagtgcctctctctcaaacaaggagttgtcaggcagctcttgagaaatattcctaatcaacttattttggaagtttagccctttcttttttttctctaccatctccatgtagccattatttgatataaaataatataaggtgaggtgccttccacagtcataatcttgtataatattaaagttactttaaaaaacatttttgcactggcgcrgtggctcacgcctgtaatcccagcactttgggaggccaargcgggcagatcacctgaggtcgggagttcgagaccagcctgaccaacatggagaaaccccgtctctactaaaaatacaaaattagccaggtgtggtggcatatgcctgtaattccagctacttgggaggctgaggcaggagaatcgcttgaacccaggaggcagaggttgcagtgaggcaagatcgtgctattgcactccagcctgggcaacaagagtgaaactccatctcaaaaaaaaaaaatttttttttgcaactaggtctagcaataaatattttacaagtacaaccttttatttttagtttctcataatagaccgtcgcctaagctggagtgcaatggcgtgatctcagctcactgcaacctccgcctcccaggctcaagcgattctcctgcctcagcctcccgagtagctgggattataggcatgtgccaccacgcccagctaatttttgtatttttagtagagacagggtttctccatgttggccaggctggtctcgaactcctgacctcaggtgatccgcctgtctcggcatcccaaagtcctgggattataggcatgagccactgtgcccaacctagatttttaaattttatttaatttttatctatttttttgagacagggtctcactctgtcacccaggctagggtgcaatggcatcatcttggctcactgaaacctctgcctcccaggctcaagcaatcctcccacctcagccccctgagtagctgggaccacaggtacatgccacgaggcccagttaatttaattttttgagacaaggtctcactctgttgcccaggctagagtgcagtggcacaatcttggctcaccttcttggctcaagtgatcctcccacctcagcctcctgggtagctgggacctcaggcttgtgccaccatgcctgactaattttttatttattttagagatgaggtctcactacattgcccaggctggtcttgaactcctggattcaagtgatacccccatctcagcctcccaaagtattgagattacaggcgtgagccaccacacctggcctagactttaattgtgtttaggtaaaattgtcttcttcttctttttttttttttcaaatagagacagggtttcactatgttgcccaggctggtctccaactcctgatgtcaagcagttcacccacctcagcctgggattacaggtgtgagccagccccacaaaattgtcttctaaagggtgatatatgtgacagcatccataccctgtggtttatggtacacaaaattccattgcaactttagccctttgacctttgtaaccccagccaccctagattcttttctttgtttcttttctttctttttttgagacagggtctcactgtgttgcccaggctggaatgcagtggcacaatcatggctcactacagccttgaccttctgggctcaagtgatcctcctgcttcaacttcccgagtagcttagaccacagtacagacatggaccaccatacccagctaatttgctttcatttttagtagagacgggggtctcactatgttgcctaggctggtctcgaactcctgagctcaagtgaactcctcccaaagtgctgggttacaagcgtaagccactgtgcccagcccctagattctttttaaaggcatcatggtgcagtagagagagactagactttggatttagaacattctgaatttggccgggtgtggtggcccacgcctgtaatcccagcactttgggaggctgagacgggcagataacctgaggtcaggagtttgaggccagcctggccaacatggtgaaaccccgtctctactaaaaatacaaaaactagccgcgtgtggtagtgggcgcctataatcccagctacccagaggctgaggtaggaggagaatcgcttgaacctgggaggcgggggttgcagtgagctgagatcgcaccactgcactccagcctgagcaacagagcgagactcaaaaaaaaaaaaaaaaaaaaaaaagaacattctgaattctagcccctgctctgccacttactagtggccttgagtaagtttttttctgttgtttttttgttttttgagatggagtctcactctgtcgcccaggctggagtacagtggcgtgatctcagctcactgcaacccccactcctgggttcaagcgattcttccgcctcagcctccagagtagctgggattacaggcatacgccaccacacctggctaatttttgtatttttagtagagatggggtttcaacatgttggccaggctggtctcaaacccctgacctcaggttatccacccgcctcagcctcccaaactgctaggattacaggcgtgagccacyatgcgcctggccttgagtaagtttttttaacctctctgaacccaaattttttcatctgtaaagtggggataacaatatgtaccttgcaggactgtcaaggttgaaatgaaataatgtaaggttccaggcctgtgcctggtgcggaggagatgatcaatgaagagttgcactcacactgataaaccaatattctaattatggggactctggagaaaccggcctgctctatcccttagaagtgccctacaagggcagtttgactttatgtttttgttttagatgttgattttttgttaaactgcctctgggtttattttatttatttatttattttcatttttatttttttgagacagagttttactctgtcacccgggctggagtacagtggcacgatcttggctcactgcaacctccacctcacaggttcaagcgattcttgtgcctcagcctcctgagtagctgggattataggggtgcaccaccatgcccagctaatttttgtattttagtagaggcagggtttcaatgttggccaggctggtcttgaactcctgacctcaggtaatccatctgcctcggcctcccaaaagtgctgggcttacaggtgtaagccacctcacccaggctctgcctctgggtttaaagagagagtgtttcttgctataaatagaatcaggaaagaaagttaaactggttttgtcacagaggcaaagttcaccccagtaagaacattcctagctctgcgttgagtccctggatttcttcacagacctgtgagaattgaagacagtgtgaagcagggagcagttgcagcttcccaggcgggtcggggacagcatggaggggaaatgggaaggctgagagttcagacaagcagggcagtggaacaaggtggacagatggcctaccaggagaaagcagccagatcgaagaggaaagcctgactgtcagtgttgaatgcacaggaaggaactagaaggaaacacacccgatgatgtcggatgcctgctttcagaacaagagggggaggccagccgcggtggctcacacctgtaatcccagcactttgggaggccaaggcaggtggatcacttcaggccaggagttcgagaccagcctggccaacatggcaaaaccccgtctctactaaaaatacaaaaattagctagatgtgatggctgtcacctgtaatcccagctacttgaatctgggaggcagaggttgcagtgtgccaagatcttgccacggcactccagcctgggtgacagagtgaggaagggagggagagagggagagcaggaaggaaggagaggaaggagaggggaaaggaagtgatcaaacagccaggaaagagaatgatgtcaacccctgagatggagctgagagatgactttttaatattaaaggggaaaaaatgatagtagccaattacggagggagggtcctaggagaacgcgtcagatgtactgcacgcaggataactgtggttgtggggccctgctgggaggggtgcttaaagggaggggtgcataaacgcagacccaggcctcagctccgggctgccaaaacctgcttcctacagaggatcaatcatggaaagtaggcctggggcagaagagggagccgatgggaaggtcggtgccccaattacagactcccttcccccaacccttctctcccacatgccacccagaatagccctggcatctttattgggtcaggctgccaatttgcgctgatcctctgctcacccagccctgtccctctgtcctgttcccagcgcctgagctttcaaaggcactcactggcccatctgttctggcccagtgtcctcctgagagatgatactagagtccttggggggaacccccaccctgtggcatagaatgaggtgttgcccgattcaaaaatttcacaaaataatttttttttttttttgagactcagactcactctgtcgcccaggctgaaatgcagtggcacgatctcagctcactgaaacctccatctcccaggttcaagcaattctctgagtaacctcctcagtagctggggttacaggtatgtgccatgctcagctaatttttgtatttttggtagagagggggttttaccaaattggccaggctggtcttgaactcctgacctcaggtgatccacctgtcttgtcctcctaaagtgttgggattacaggtgtgagccactgtgcccagccacaaaataataataattttttttttttgagacagagtctcgctctgtcacccaggctggartgcagtggcatgatctcggttcactcaacctccgcctcccaggttgaagtgattctctcacctcagcatcctgaatagctgggactacaggtgcatgctaccacacccagctaatttttatatttttagtagagtccgggtttcaccatgttggccaggctggtcttgaactcctgacctcaggtaatccacctgcctcagcctcccaaagtgtgggattacaggcgtgccgtgagccaccacacctggccaataataattttaaaaggagtatatgggaagattcagattcctagtctctccctaattgcatgaccttggacacaaaaggcgctgcacctccctgagcctcagtcttctttgctctatccacacctccggaggttgttaagttcagatgaactgtgtagaagcacgttgtaaataagttgccattttcctaattttcccactcccctcttagaggggatggctctgcatttccagcagcgtctgcagcaggactgtctccttgmtgccactgccactgaggctgcctctcctcacgggcacgcctcccggcatcctgtaagctcagctgcagacccagctggggcttctggagccttatctttccttgttttcatctatagagagggtcagcagggaccactaatggggtacggcacctttttatatgcatcataaactaaaccacaagaatgttatttcccatcactgccagctgcagaaggcagccattgttctgtgggcccctgcacagcttgttctgctgttcaaggacagaatgtcctaagctttgagttactcggcctgtttcttctcctcttccaactgtcgccttttgacttttatccttgctcatttcatttgtatccccacttgaaattagcaagtggaattgaaaataaatcataatcacagctgccatgtgttaagccctgtggcrggtgtactgtgctaagtgcttgtcttgtttaatctcagaaattctgtatgatagggatgatatatctgaggctcagagatagtaagccacttccccaagtaaaagagcttgaaggggcagagccagcattcaaacccaggtctgccttactccaaaacctgtgttcttttatttttttaaatggaagtagctttcttgttttctttcctttcttttttctgtttgtttttgttcagggtagtaaaagtattttaataatccatcacactcaccaaattgctgaaagtgaatagcactcaatgagctctctaggatgtagaccaatggaaacttccataagtgtaatcactttgaaaagcaattgacaatatcaagtaaagctgaaaatccacataccctgcaatgcaacacttccattcctggatccataccccagggaaaatgttaaatataagcatgaaaatacctttagaaatgttcacagcagcattctttacaaaactggatggcaggcatacagatacatatttcctgtagatgtttgaactaattaattagtataaagttatacatattcattgtaaaaaaatttttgagatattgcagaaaggcagagagaaaataaaaatcacccataatcacacaattcaaagattataactgtcaacattttgttgaatatctagactttttcctaagcagacacacacacacgcatttccttaaaactggccaggtatgctggcttatgcctgtaatcccaacacttggggacactgaggctgggggatcacttgaggccaggagtttgagaccagcctggacaacatagcgagaccccatctctacaaaaaatttaaaaatacaaacaaaaacttcatctttttatttgctcttttattaatatattgtggcagtctttctgcatgtatgtagagccacacacaaatttttttgttttgttttgttttgttttttttttttgagactgagtctcactctgttgtccaggctggagtgtagtggcgtgatgttggctcactacaacctccgcctcccgggttcaagcgattctccagtctcagcctcccgagtagctgggactacaggtgtgtgccagcgtgcctggctaatttttttttttttgtattttttttagtagagatggggtttcaccgtgttagccaggatggtctcaatctcctgacctcgtgatccacccaccttggcctcccaaagtgctgggattacaggcgtgagccgctgcacccggccgagccacataaaaattttattgactacataaagttccttcataggactgaatagtaatgtaactgggtcctaataatttaaccaaccccattttggttgtttctaattttttgcagttgtaaataatgcttcagggccaggcacagtggctcatacttaaagtcccagcactttgggaggctgaggtggaaggatagcttgaggcaaggagttcaaaaccagcctgggcaacagagtgagaccctgtcaaaaaataacaaaattagccaggtgtggtggcacctgcctgtagacctatctactcaggaggctgaggcaggaagactatttgagcccaggaatttgaggctgcagtgagctatgatgttgccatcacactccagcttgggtgacagagcaagactctgtctatagaaaaaaaaaaggcttcagcaaatacccctgcatgtaaatttttctctttacctctgattatttgcttagtgaagttcctaggaggagaaatttgggtcaaagaatatgcatttaaaattttattatttatttttttttaagactgagtctcactctgttgtccaggctggagtacagcagtgtgatctcagctcactgcaacttctgcctcccaggttcaagtgattcttatgcctcagcttcccaagtagctgggactacaggtgtgagccaccatgcccggctaatttttgtattttctgtagagacggggtttcaccatgttggctaggctggtctcgaactcctgacctcaggtgatccacccacctcggcctcccaaagtgctgggattataggcatgagccactgcgcctggccataaactttttttttttttaaattagagctgggatcttcgctctgtagcccaggttggagtgcagtgactattcattggcacaatcatagcacgctacagcctcagactcctggcctcagatgatcctcccacctcggcctcccaaagcgtggggattacaagcatgagtctctgaggctggcctgtttgttcattgtttaaataacagctctgttgagatgtagttgacctatcataagttcaccattttaaagtgtacaattcagtggatttttttttagctctactgcttaataatgtagtggattttagtatattcagagttatacaaccgtcaccactatctaattccagaacattttctttctttttcttttttttgagatggagtctcgctctgtctcccaggctggagtgcagtggggtgcgagtcggctcactgcaacctctgcctcccgggttcaagcgattctcctgcctcagcctccttaatagctggaattacaggcatgcatcaccacccctggctaatttttgtatttttgtcagggaaagggtctcaccatgttggtcacgctggtctcgaactcctgacctcaagtgatctgcccactttggcctcccaaagtgctgggtttataggcatgagccaccacgcccagcctaattccagaacattttcatcactccaaaaagaaaccctgaaccaattagcagttactcctcattctcctcaaaacccctttccccagacctagacaactgccaatctactttctgtttctatggctttacctattccagatattttatgtaaatggaatcacacaatatgtagtccgttgcgactgagttcttccacttagcaaaatgttttcaaggttcgtccatgttggaacactcatcagtacttcattcctttgtattggtgagtaatattccactctatgaatataccacatttggtttatcaacacatcagttggtggacatttcggtaatttccactttttggctattataaataatgctgctatgatcatttgtgtacaagttttcatatgaatacatgttttcaattctcttgagtatatgcctagtagtggaagtgctgggttatatggtaagtctatgtttaacttttttttttacattctcactaatagtgtatgagrgtttcattttctctacatcctcaccaacatgtgttactgtctgtctttaaattatagtcatcctagtggatctgaactggtatccattgtgggttttttttttttcttttgagacaaggtcttaaccctgtcacccaggctggagtgcagtgacatgatcacggctcactgcagccttgacctcccaggctcaggtgatcctcccacctcagcctctcgagtagctgggattacaggtgtgtgctaccatacyctgctaatttttttttgtattttttgtagagacagggtcttgctatgttgcccaggctggactcaaatttctgggctcaagggatccacatgcctcagcctcccaaagtggtgggattacaggtgtgagccaccacacccagccaccattgtggttttgatttagatttccctatatgactaataatgttgaacatcttttcatgtgcttatcaaccatttgtatatcttctgagaaatatctattgagatcctttgcccttttttttttttgaaacggagtcttgcagagtctcactctgtcacccaggctagagtgcaatggcgtgatcttggcctactgcaacctctgcctcccaggttcaagcaattctcctgtctcagcctcccaagtagctggaattacagatacatgctgccacgcctggctaattttttgtattttactagagacggggtttcaccatgttgcccaggctggtctcaaactcctaagctcaggcagtccacctgccttgggctcccaaagtgctgggattacaggcatgagccatggtgcctggccctggagtttcagttctatttcattaatctatatgttcgtcttatgcaagttctatagtatcttggttactatagctttgtaataagttttgttttgttttgttttgttttgttttgttttgttttgtttttgagatggagtctcactctgtcacccaggctggagtgcagtagccagatctcagctcactgcaacctctgcctcccgggttcaagcaattctcctgcctcagcctcctgagtagctgggactacaggtgtgtgccaccacacccagctagtttttgtatttttagtaaagacagggtttcaccatgttggccaggctggtctcaaactcctgacctcaggtgatccgcctgcctcggcctcccaaagcgctgggattacaggcatgagccaccacacctggcgctttgtaataagttttgaaactgagaaatgtgaggcttctaactttgttccttttcatttcaagcctgagtttttaaccattttattatgctaactcctatgaagaaaaataggctgggtggagtggctcatgcctataatcccagcactttgggaggccgaggcaggaggattacctgaggtcaggagtttgagaccagcctggccaagatggtgaaaccccctgtctctactaaaagttaaaaattaccggccaggcgcagtggcctatgtctgtaatcccagaactttgggaggctgaggtgggcggatcatgaggtcaggagatcaagaccatcctggccaacatggtgaaaccccgtctctactaaaaatacaaaaattagctggatgtggtggcatgcgcctgtaataccagctattcgggaggctgaggcaggagaatcgcttgaaccagggggtcggaagttgcagtgagccgaggttgtgccacagcactccagcctggtgacagcgagactccgtttccaaaaaaaaaaaaaaaaaamaaaacagaagaaacaacacacaatgaaggctgggtgacagtgagactctgactcaaaaaaaaaaaaaacagccaggtgcagtgattcacgtctgtaatcccagtactttgggaggccaaggcagggagatcacttgaggtcaggagttcgagaccagccaacatggtgaaaccctgtcctctactgaaaatacaaaaattagccgggtgtggtggtgtttgcctgtaatctcagctgctcaggaggctgaggcacaagaatcacttgaactcaggaggcggaggttgcagtgaactgagatcgcaccactgcactccagcctgggtgacagagcaagactttgaaaaaaaaaaagtatataaagctacaagctaaagtgagactggatttcatttcagccttcaatcagtcctttctactgcagaaacaatttaaagcaacaggagtgaagaaatattaatatgtacctctttgtgttacacagtagtctccacttatccatgggggatactttttttgttttgttttttgtttgtttgtttttgagatggagttttgctcttgttgcccaggctggagtgcaatggcgtgatcttggctcaccacaacctccgcctcccaggttcaagcaattctcctgcctcactctcctgagtagatgggattacaggcatgcaccaccatgcccagctaattttttgtatttttagtagagatagggtgtcttcatgttggtcaggctggtctcgaactactgacctcaggtgatctacccgtctcggcctcccaaagtgctgggattacaggtgtgagccactgcacctggcaggggatacgttttaagacctctagtggatgcctgaaactgcagctagtaccaaaccctatatatgctatgaggtttattttaaattttattaatttttttaaattgttgtgggtacatagcaggtgtatatgtttgtggggtacatgagatgtataagacaaaacaattataacaatatactctaataaggctgggtgcagtggctgatgcctataatctcagatctttgggaggccaaggcaggcagatcacttgaggtcaggagttcgagaccagcttggccaacgtggtaaaaccccatctctactaaaaatacaaaaattagccgggtgttaggccaggcacggtggctcacgcctgtaattccagtacatcgggaggttgaggtgggtggatcacctgaggtcgggagttcgagaccagcctgaccaacatggagaaaccctgtctctactaaaaatacaaaaaattagccaggcgtggtgccacatgcctataatccaagctactcgggaggctgagacagaagaatcacttgaacccgggaggcagaggttgtggtgagccaagatcatgccattgcactccagcatgggcaataagagcaaaacttcgtctcaaaaaaagaaaaaataaaataaagtaaaattagccaggtgtggtggtgcatgcctgtaatcccagctactcgggaggctgacgcaggagaattgcttgaacctgggaggtggaggctgcagcgagctgagattgtgccactgcactgcagcgtgggtgacagagtgagactccatctcaaaacaacaacaaaaacacaatatactctaatagaagtgatgcaggtgtgtctgtctctcgaaacatctgattgtactgtacttgcctattttcagaccacagtaactgagactgtggaaagcgaaaccacggatgagggggacaactgcactagcttcagttgtcaagctgtattagagcaaggagaagaaaattccagaacttgcagtctgcagggcctcctagctacctgaatgatatttaggtcctcatgatgtcatttgctgtttgtgttccacagaaatcctttctaatatagcctctttcctacagcagtagcagccagatgaagaagcggccaacatctgcagtgggctacaagaggcctatcagccagtatgctcgggttgccatggcaatggggtcccaccccaggtacagggtaagaagcggagaggggagaaagagcctaygggagggaggccgggcgaggtgtctcacacctgtaatcccagcactgtgggaggccgaggcaggtggatcacctgaggtcaggagttcgagaccagcctggttaacatggtgaacccctgtctctacyaaawatacaaaaattagccaggcgtggtgatgggtgcctatagtcccagctacttgggaggctgaggcaggagaattgcttgaacctgggaggtggaggttgcagtgagccgagattgcaccactgcactccagcctgggcaacagagtgagactccatctcagaagaaaaaaaaaaaagagcctatgggaggggatgctcacagcctctgcttcccctaaccacctcatcagccctgctacacccaagactggctgagtccctagaaggcacagtgactgggcactgttcaagcctggcatgatattcccaccacaggctgaaaacataatgtttctggagttggatgtgtcccctccagctgtctttgagatggaattctctcacgaccaagaacaagaccctcgtgcgctacacatggagaggctcatgcgattggacagctttctggaaagaccttccacgtctaaagtccgaaagtccagatcctggtcagtacctccatggtcccaggcagcactggacccaggaggcaggggaactgcaggcgctgggtgatgctaaagagggttttgctggtacccgaagggcaggaagggcaaggggtgactggggatgtcagaaggattcctgcagcaacaggatggggcaaaggagaggacccactttcctgtttcctgtatttccctaacctcccctttcgcctgcgtcatctcccctgcaggtgccagagtcctcagcggcctccaccttccaccacacatgcctccctggcctctgcttctctgcgccctgcaacagtggcggaccatgagtgacaaccatcacgtcaggctgcccatccaatagactcctgggatggggcagccaaccctggctcatctcatctgccgcttggtgcgtgtgcgtgtgcgtgcatgtgcgtgtgcgtgtgtgcaggggtgagaatctggcagatggtgcctctgcctgctcttcttcgcctcctttatttaattcatgttatttattcgcggagctcwgttcgtgttggggagatgccctcgcctgagccgtctgggcctaccgtggtcactgcgtagcctctttttcttctgacttgakagctcccccagtcagatctcaggcttgtccccctgtcagctgcctccagaagggaaggtagccagtgcctgagaagacagtcccttttctacccaccgcactccataacctccatcttctcccacactgatggcgagcagcccctgagcactttctgggactgggagactgcttggtgttccctgaggacaagagacatcctgacagtgttgggcatctgctccccgtggacacagccccactctccactttctgagcctcagacaacctcattcagcctcttgggctccttttcaaggacattaataacctcaccaacatagctcatgcccttcagctttgacaagaactcacrgcttcccaaactctgctttctgcccaccttggatgggaactgtggaccaagcaattaccatcgccttggaacctgcaggaaatggaacagcaattgagacaacttgaacagtcatcaacggaagtccctccactggattcctttgtttctgtcccctccgaggagtcattttggtcgacaggctctcaaggcaactccccattttcaagaggctgctcctgcctgcttcgatcatttctccctgcagctgcctagaccccgttcacagtgggaggagtcaatgtcattctacccctcgctaaacgaagatattaacatctattgctttttcccttcatctgtcacaggaaacagaagcccaggcacaatcttttccagctttgcctgttacccctgtttctgaattgcatctttaaggtattattttgttgamaatagatcctttattcactagttacgcaaattggttcctagggggatactccttaccttcctttgtgatggcccaaaatgtctctaggtatctcaagtgataagtaaatttctacaaaaaaaaatggttaatgttcattgactggctttttaagtgtatattttggaggacgggtgaagaggtaataacgaaagcaagygagtgaattaggatttcaaagtgccctaatagtgtgagtctccagttcctagaatatgaagagtgctgtcgttggggtgaaaccatgagactgacagatctgcctgaaatggggggtgtgggaggtggtggcgggggttattctctttccttcaggaaatgaacccttcttacatcattcaagttctgctctgaggatcaagcttgggtctgatttaactcagcgacactgtcatttctgcttcattactggactagagggttgagccacccacttgccatttgctcctgtccttccaggaaatcacaattttcatcagagcccaagagattatttgagactcaggattcagatcagaggttcgactgtggctgggacaggagttgtgtgtagaaattcaccaggtggcctgagcgcagggggacctccagggctgcgttgagcagcctctcccactgacctctttctcgtttgtggacaaagcagcacgtatcacctcattcatcacttggacacatcgcctttgcattgtcttgtcacacctccctcacagtcttatagcacaatatacccaaatcagcccccscagtccgagggctgggcccaaggtatggtcggaggaggagctcctgcctgcggttttgtgtatgtgtgtatgtgtgtgcgtgtttgtgtgcgtgtttacctccacaggggacactctacactcagtgtaagatctgctgggaacagggccaccaggagtggctggatctcagtctctctgtctctctttctctccttttccttttggtgtatcaaatatttgattgacaaagtaagggccttgattaggaccaaattctcgtgtgttgctatggtctttatttaggacaacaattaacaatgcagtggcccattcttgtcactctacacatatgactatacgggacatatgtaatatataaatatatatataaaacattcccctctgtccccttggcttcggatggaggcctttctgttgagctgaaatgcacctgcagctgggtgctgccagcagcttgcaggccccagccctgttccaatcaaygcagttgacaataaaggaatgagtatcgtcacggagttgactgccttacttctcttccctttgtttcttcctactttaactccctccctttttcattttctcctttctctctcttccatgtttttccagtaggggctcaagagtatatcagccagacgtggtggctcacacctgtaatcccagcactttgggaggcccaggcaggcagatcacctgaggtcaggagtttgagaccaccctggccaacatggtgaaaccccatctctactaaatatacaaaaattagcctggtgtggtggcacacacctgtaatctcagctactctggaggctgaggcaggagaatcatttgaaccctggaggcagagcttgtagtgagctgagattgtgccactgcactctagcctgggcgacagagcaagactccatcccaaaaaataaaaataaaaagagcatatggattccagctgcagttatcagcactttggaaaagaactggttgcttaataaatggagatctgtttgcccaatagggctggggagcaggtcccaggcactagtcggaagtctgtgccgggactatggcagcagctgtttgtgttctaggctggtcgtccccaaccagttaattctgagcaactggcagatttcagaactgcctcagtggtgtccagattagctgtcactgtcatactccctatgccctcattgatccaccaaaggggttaaaggaggaaagaatgcatgtaaaccacacagatgtgcctgggcctgatgggtgctgaattacaataacttgaaagtctaggccgagtgcggtggctcacgcctgtaatcccagcactttgggaggttgaggcaggtggatccctgaggtcaggagttcgagaccagcctggccaacatggtgaaactctgtctttactaaaaatacaaaaattagccaggcatggtggtgcacacctgtagtcccagctactcgggaggctgaggcaggagaatcgcttgaacacaggaggcagaagttgaggtgagctgagattgtggcattgcactccagcctagccaacaagagtgaaactgtctcgaaaagaaaagaaagactagcttcccttatcctctcttctcaggacctattttccctcctgctgggttctagccactagctctctgtagtgtggaggtcttacaggaaatgaaaattagttattgctaaaaaacaaacaaacacaaagctttgaaccctgactcctaggggagcactgaagtttgtctgctgcaaaaatcaggcagtaaaccaactattttggcactgacagttttcttagagggatgtcctgtctctgtgccaggctctcaccctgatctctaacagggttccagggctggagtggctctgctgcttcgggggcgtttgctaggtattgtgtaaggtgctttacacacacagacacacacactcacactcatttcattctcctagtgagaggattatggtgactgattgagagatggaagtaagcgaaattaactaactggctaaagacccagtacgtgatgaagctggacttgcagactctagaacccatgttttgccctctttgccacactacttctctagcccatggaaaactgacaggcactatacatggttcccaagtggtgacagccagggacagaggacagagtgatttatctcaatgggcaaggttcggcatcagaccagatctgcagacccttgcctagaggtcctattgtaaaaccactcattcaggacaggcgcagtggctcacacctgtaatcccagcgcttcgggagaccgaggcaggtggatcacctgaggtcaggagttcaagaccagactggccaacatggtgaaaccccatctctactaaaaatattttaaaaactagccgggcgcggtggtgggttcctgtaatcccagctactcgggaggctgaggcaggagaattgcttgaacccgggagacggaggttgcagtgagccgacatggtgccactgcactccagccttggcaacagagtgagactccgtctcaaaaaaaaacaacaacaacaacacaaaaccgctcattcctccattagcagtgggatcacctgtacagcaggtggttttcttgagccccacagaaacagccagggggtagaaattctcccttgacccaggcctctggtcttttgttgatagacagttcattgataaggaaactgccatgtttcacttcttcttccaaaactggacacctgctctccacagagttacttctttttgttctcagaacctagagctggggcgtagaaaacactaccctttgtccttgtccccttggcgtaggatggatggggtgagtgtgagttagaactcttggctaccactaaaaaatcatttaagctggcctgacccagaggcgtgctgtggcacacaaaggcaaggaaagacccaggcctcaggaatgacctagtaccagggactcaaacaccacaaagaccctctctgtttcaccacacttccttctgtgtggggttcacactctgtcctcagctgctccagttcatgatgtaggaaacacatctgctagcagctctctgggtacatgatccagccatccggagagagttagcatcttggtcccaatgccaaatttatgggaatgggactctgatttagcagtttgggtcaggtaggtgggaatatgatgtacgaacaaaacctccaagagtcccaaggctgtaaccatgcagatgtgggggagggatgaggtagaaataaaagtatttctcaaaaaagatgatggaagtaggagtggagtcgaatgggctctgggcagccagcacaacagatgttctttgccagtgtgtccatcacccaggaggatggctttagaaaattttaatctggagccgggcatggtggcacacgcctgaaatcccagctactcaggaggctaaaggcaggaggatcgcttaagcctgggaattcaagatcagactgggcaacataacgagacaccgtctcaaaaaaagagagaaaaagtgaaaaagaaagaaaatttcaatctaggctcattttattaccccggccatttttctttttccttttctttttttttttttttgaaacaagagtcttgctctgtcacccaggctggtgtgcagtggtgctatctcggctcactgcaacctccccctcccaggttcaagcaattctcctgcctcagcctcccgagtagctaggatcacaggcacccaccaccacatccagctaatttttgtattttttcagtagagacagagttttaccaccttagccaggctggtcttgaactcctgacctcaggtgagccacctgcctcagcctctcaaagtgctgggattacaggcgtgagccacagcgcccggtctaccctggccatttttcttacaatgtggtccaagagttacctggatcaaaattactatccttggctgggcacagtagctcacacttgtaatcccagcactttgggaggccaaggcaggcggatcacctgagatcaggagttcgagaccagcctggataacatggtgaaatcccggtctctattaaaaatacaaaaattagacggacgtggtggtgggcacctgtaatcccagctacaggcaggggaatagcttgcatccaggaggcggaggttgcagtgagcctagattgtgccactgcactccagcttgggtgacaagggtgaaactccgtctcaaaaaaaaaaaaaaaattaccatcctcagattctgcttgatcaggtccaggataaacccactggtagacactacaggttgcctttccaatatccattcttcccttcctccttgcttaaaagataattttgttcaagaagggcagtgtgcccaggtaaaaatattcatattcccagactcttacagcaatgggttgccatgtgacatggttttggctaggagatgtaagtagaaatctgctagggatttctggaaaagtttttgctttcctgatatagataccatccttttctcctcttctgttttcttcttcctgcctggaactcaaacgcacctcttgcaagtgcattcattcattcattagacaagtatttattaagcactcgttacctatatgttccaggtaatgttctaagtgctgggaatacagcaatgaacagaaaagacaatccgtggctgggtgtggtgactcatgtctgtaatcccagcactttgggaggcttaggcaggtggatcacttgaggctagcagttcaagaccagcttagccaacatgacgaaacatcatccctactaaaaataccaaaaaaattagctgggcatggtggtgtgcacctgtaatcccagctactttggagagctgaggcaggagaatcacttgaacccgggaggcagaggttgcagtgagccaagatcgctgcattctagcctgggtgacagagtgagactgtctcaaaaaaaaaaaaaaaaaaagtccctgtcgtcatggtgcctacattctagggttaggagaaagactttaatcaagaaaacatattgcatgttggataatgataagtgcttttttttttcttttgtgacagagtcttgctctgtcaccccggctggagtgcagtagtgcaatcatagctcactgcaaccttgaacttaaatgagcacctccagatgacttctttttttttctttctctttctttcttttttttctccttttttttttttttttttttttttttttgagatgtagtctcactctattgcccaggctggagtgcagtgtgcggtcttggctcactccaacctccacctcctgggttcaagcaattctcctgcctcagcctcccgggtagctgggattacaggctcacctcaccacacctggctaatttttgtatttttagtagagatggggtttcaccatattggccaggctggtctcgaactcctgactttatgaggagcctcagcctcccgggtagctgggattacaggcatgagccacacgcctggctggtgattccttcctttctttctttcttttttttttttgagatagagtttcgctcttgttgcacaggctggagtgtagtggtaagatcttggctcactgcaacctccacttcctcagttcaagggattctcctgcctcagcctccccagtagctgggagccgggctaatttttgtatatttttttagcagagacagggtttcacaatgttggccaggctggtctcaaacttctgacctcaaagtgaactgtctgcctcggcctcccaaagtgctgggattaaaggcgtgagccaccgcagcaagcccccaccagatgatttctatgaacactcactaatgtgtgagaatctcagtcccagccctttgttattcacagccatcctcacagcggacctgcttttcgacaggcccagcgctggggccggctgtttgtgtgacaccaggattgggctcccgggtagtagagcacaaagagggcacaaagccgctctaaggcaccccagtgctcagccacttttcccttcttcacaacagggtgggggagaggcggggtgcttccctctttgggctaggaaaccaaagtgatgatgatgatgatgatgatgatgatgattgttattaattttgagacaaggtctccctctgtcacccaggctggagtgcagtggagcgatcatagctataacctccaactcctgggctcaagcgatcctcctacctcagcctcccaagtagctgggactgaggtgcatgctaccatgcccaactaatttttgtattttttgtagagatggggtcttgctatgttgctcaggctggtctcaaactcctggcctcaagcaatctccccatctcagcctcccaaaatgctggggtgacaggcatgatctaccatgctggcctaaagtgattatttgttaatatccaaagcttttattttgcaataaggaaaagtaggccaagaaaaggaaagtgattctgaaaagtcaca

SEQ ID NO: 97669 - DNA, 54231 bp, Homo sapiens
taaagagaaaatatgtgtgttacataagttatgttcaggcactcttagcactgttggccatgagtgcaattaaattaatcgacagtgtgtgtgtgtatatatacacacacacacacacacacaattttttttttttttttgagacggagtctctgtcgcccaggctggagtgcagtggcgcaatcttggctcactgcaagctccgcctcccgggttcacgccattctcctgcctcagcctcctgagtagctgggactataggtgcctgccaccatgcccagctaattttttgtatttttagtagaaacggggtttcaccgtgttagccaggatggtctcgatctcctaaccttatgatccacccacctcagcctcccaaagtgctgggattacaagcatgagccaccatgcctggccaatcgacagtatacattaaatgagatatcttcaaacaggaacacaaacaaaataaggttatatattgatcaactgaccaacatgttattactggaaatgtgaacttaatcctatatttctcttgggcaatgcttcaatacagtactcccctatctacagttttagttacccatagtcaaccttagtctaaaaatattacatacaatacactattctaagggataaagaccacattcatataactgtaactagggtatgctaatataattgttctattttgttattatttttattagtctcctgttatacctaatttaaaaactacactttatcataggcacgtatgtacaggagaaaacacagtaaggttcgttactatccccagtttcaggcatccactggtcttagaaggtatctcccatggataaggtgggtactaccgtattcactgttttgtgggaactttaaagaactaccacaaataatgagaatcaatcgtacctgtgtcaaagaagagactttccagaagtactgactaaacctctaaaaataaaaccaagtttttatcttctgtttgttcacatgtattccatccatagtattccatgatgtttatgtaccagacatgctggagggacatgtcttataatgggatatgtacattgctgtggggagacctgaggaagcccctcaaagaggtagtcattctccaaatcaactaaaattgataggcaacaggaggcctgtgtgaatgctgatcggcaaaggaattatcacatgaacacaaatacttattacattaagtcactgcaggtagacaaaaacaaacaacagtttcaaatatgagcctttatcaaaaggcacaagagtaactgaattttatgtgccaatgtgccatcaggtatttttttcacaccagtgatgtcaagtaactagcaaaagggtaaagtaaaaggagatatttaagcaattagttaaatctcctgaaccaaatgtgggatagccaactagtacagaatagccaccatagaatattttttaaagtatagtacatgaatctatgtatcatgcaaacaaagagaaaactcactattcctgcactttcatctaactacttgctttcatggacctaaagaatagatccagtctcagtagtgtattaattataatttccaacttgtttggcattttatttaatttccagaagatgtcataacataaataaagcatacctttcttcttccttcctccttccgatcaaaagcacattgctgtttgcactgttcacaggtctgaggtggtccatactttttttctgaatttgtgcaacgctgacacttggtaccaataaatgctgcaattatgttacagtactgacaaggcttgggctgaaaaacatacacattttgagacttttaaaaacattaaatatttgcggcatagcatatacccagtgttgtagacatatttctggaattaagaaaactcaggtaaaaaatttgttttctgtcaagtttgttgccctgtcacatgcaataacttttataccatatttctatgcattcaactagtatttatttctagtcatgtaactattactctaagatcgtgagaaatagatttgtgatttgcatagtctgttagataatacaaaaactacacataaaaaaggttttaaagaacgaaaataaaggtacatatgtagagaagtctcatgaatcaagaatttgaggaaacgtccttctactaatatcctagttaccttaatgaccatatcatttatttagaaaatgttaacttttcatcacatataggtacaaatcatataaggaatatatactgtgagttttcaactttgaaaaaatgagaacaagcatattcaacataaactataaaaacataccttgattttctttgatattcaaaagatgattcagggcagtttagagcgttaaagttagcatttttgaccaataataaataatattggtataatatacctataatgattgtagtatacatataagacaatttgtactaggattgggtcatgacttctgtgaataaatatctttaattgcgctgttttataaaaatagttctgaggaggctgttctgaagtgggctaaagtctgatgatgcaaactttatggataagttctccataaccaagaatttgctatatttgaatctctaaagaacagcttcacaaatttcacactggattcaatacatgtaaaacaggtatataatttgactgtttttaaatgttatcacctttccatcaaagtatctatagaaaatgtctttcataaaatatggtatgttgaaatatctaagagcatagcagtagtttttttttttcgagacgcagtctcgctctgtcccccaggctggagtgcagtggcaggatctcagctcactgcaaactccgcctcctgagttcacgccattctcctgcctcagcctctggagtagctgggactacaggcgcccaccaccatacccggctcattttttttttgttgtatttttagtagacatggggtttcaccgtgttagccaggatggtctccatctcctgaccttgtgatccgccctcctcggcctcccaaagtgctgggattacaggcgtgagccactgtgcccagccagcagtacatatttttttaaaaggtccagctttatgaaaaatattaactggtaacaatgacatgaaaacataagacatacttaccgtcccaaattgcttcacattttgagcacacttcttacaaattgtgttagttttgctgaaaaataaattgtatatagatcatgtttatgtagctttctaaagtaattagcacaatgtcaaaataaaatgagtcaaagatttgttgtacttaaaactttaataaggaccacggatttttttcaaatatacaaggatattttcagagttgttttacccaaattaacttatgacaaatgtttttatacatttttattgcatattactttttgtaaacaaaacatcttaatgtttcctatatagctccaaaatcttcacacttgacactattactgcacagcattacaataccagtgcctacctaaccttccacttggctactgtccaacattataatgcccacacctatttatgaagaaattatttgttcttttctgaggctactttctgtatatactctcagagtggaactgttaaaaatgttacgtactactcctcttctatgtaacaaattattagattttcaccttggaaggcagttggtaacactacagacctttcctcagatccattaaggctttaccatttttttttagtttaacataactgtttacatttgcattttcattagcaaggctgtacattttccatgtagtattattccttctctcatataaagtctaactgtaaattaaccaccactggtttttttcgcaacattctctctcccaccatgtataaaaggtttacaacttaaaatttctggggctaaaccattttttaaaaatactttcataaaaacatgggattacaacccccaagtattccataaagacaacacttgtctttaacagtcaaaaactattcagtatacaaacctctcttgttgaaattctgatctgcagtaagtacattttacaataggatgtgcaatccgacattcctgtaataagacaatacattagtcagtatctttctgaaagtcccaaatctcacttttctggtagaaaactgtttacccaacctagtgaaagtctaaaacatttataaaacctggccccaacgtaaagaactggatgctttatcatataagtggccaatcacaatataattccttagggaaggcacaggtgtctttgtctttagtagacgtgggggtatattacagacaaattaagaaagctgtcagggcctatttcaaggattggttaaatgtgaaactacttattattttgcaccgttgctcacagacagcatccaggctttaatgggatgggaggagctccaaatcagagcattctgttcccaaaccagtcgcttcgctttcctggacagggaagaaggatgccatcagctttgcggcttcgggttcctagcaagaaagtgcaaaaaccgtcccctgcctcctggtggaagaagaggacagaccaggcagaaaaccgagatgaaaacatctccacccctgggtctctgcggcatagacaggtggctgcctcactcaaccccactcctgagacccccagacgctgacggggcccggcaccctcctgggccgcctggaaaagggcacgattctgcctccctttcagggtccgttcccagctaatgttcaagcccccagaaaaaggggtccccgagtggggaggcgagggctccagactcccaaacccctgaggcgccggcgaagaggggctgcagtgcagcggctacccggccccctccggctacggccgaggacacccatcccgcccgcctcccggagcccacggaccttgcagagctgctggccctgggagagctcctcgaaaggataacgctgggtacacttggtgcaggcgtacagggccgaggccgccatcctgctcctcagtctcctcctccgccgccgcccgctccgaggcggggccctacggagaacccgagagccgccgccgcccgggccgcgggctcctcctcctccccctccccctgcctcgcgcccaccagggcctcgccgcgagagcccagggccccgcggacgacgccaccgtctccctccgcctccacttccgccccagcccacccagtgacgccgtgccagccgctcccgcttaggccccgatagcggcggagggagacgaagcgggtagggggttgctgtttagctgtgcggccgtggatccgcttccttctcggcctccctttcccatccctgattggctgcgaaggctatcgcgtcattcgatggctcctcccaactcccaacttccgcgacgcaggaagcgcccacaaagggaggatgtcgccggccaatgacatcccggagctctcagcgcgcgaaatccgctttgaacctgccccgcccaaaggtctgcggtcgcggctatttctaacagccagtcccaggtttggctgagagcgccccaatccaattgagcaaatgttcgcgaaaggctcgttctctgccgcaactttttttcccttgctttctattggactaaatcgttaagtccctcctaatcctatttgttattggccaaaaggtaaatacttcacctggagaggcgtccccgaggcaaattcacgctctctccggcgtttaatccgagggaactcgtggagtgctttaacttcgccttcgcttttgttttatctccattactcccttcggttgccactggcgacaccactactcgcccacgcttcttactggaggaggcccgaccctccgtagaatccccgcagagccggcctgtaaccccggcgttgtctgccccagcgggccccgttacgcgctaccttgtgacgtcaccagggaagaggcggattctctcctactacagaaagacgtctgctgttttgattggctaggaaagacgtccgttaggacgtgttgccctttctgtgtaagctgtgagcgtaggcggccctgagggggtgtgttgcaggggtttccaagcccagcaccagcacccttgcccttttccatcaggggttcagcctagggtcccygctggtgggcggctcccgagtcttggagaagagcrcgagaacctagaccgccccmgaagygcggagaccccctgggcaggctgaaagatggcggcggcgtctgtctctgcggcttctggttctcacttgtcggtaagaagcagttggcgcgagtgggccccacgtcggccctaagcgcctctttgagtttcctcacgtttcagggcgctgtcagtccagcttctgacgcaattctggaggtcggcgggaatgcctagattgccccgcgctccccaagcttccattcactgtkgctgtgtcgaagctgcaccctctggctcccagtgaaactgggctggccgcccctgttccccagcccttattcaccttttggcgtagcaaccaaccccggttgcctaacattcccaagggccggctgggataactgcccactccctggcctgcaaaaatgtagctcttttggtcacgtgggttcagcggcccctctaggaaactcgccagatcaggtgaggcgcgccagtgtgtttaagagacgttgcagaatagtagtccgccgtctctcgagcgcttactagtcgttgcttatgctgtttcctatccctgcagtgcctcccactcccatccacattaacttcgttgtgtgatrctcgtagccagaacgcgcgcttcctgtcacctagaattactggaacttcaatgtggaaatgcccttttggagaggcgacagggggaattgattttaaatattgttttcgcctcatcaaatgtcaccatccagtttagttactggtattcactggtatttctcaaattggagtgtcgaatgcttaggtttttgaaaaccgcggcattggaaagctttgataggaagtaaatgttggagctcttatttctccagttagcaaatgttcgatgcctggtatactgttagggtccaaatgaayagaatagaaaccctgctttgaaggagaaaaacactgaagagaaactacacgtaattagtgattactgcgcagtatagtttaggaagtgctaccgtagtagaataatctagaggggagtgattaacagtgcttgggtaggctagagaaggtttcctagaagggaagatggagctagttgcgtgtcgaaggaattgtgattgcttgtcccaagagtagagaaaggagaaaaaggcagtgcgggaattttggagtatgtgctagaacagtaggtgcttttaggaaacttgagatagttcggaatgagaagaagtaatacggaggtagagctggatgaggtgaattggaaacgtaggtaaaaacgtgaaaaaagaaggatggtgagggaaggaactagaagagtatcagggtaaagttattttctaggatctagggggaaagagttggaaacgctaagaaagcctggtcaccttggagaagtcagtttcagcttttggagacttgttagaatttgtaataatgggactagaagtattacagtgtttcagccgaatgggaattagaagtttgcagagaggtctggggaagttaaggagaagtaaggaaagcagcaatttaaggttattcaggattaggtcagtaaaagaaaaaagtaaaaaactattggaagtgtcagcagatggatgagattttataggagatgtgattaaacttgggagaagagggcttttcacggctctcaaaagttaagcacttggagaccgaacaaggaatactcttacaaatgttgaattgagtctgggtgcgtggctcatgcctgtaataccagctactagtgaggctgaggcgggaggatcactgaggctgaagtgaggtatgatagtgccactgctctccagcctgggcgacagagcgaccctgtctccataaaataaaatwttaaataaacgtttaattgagctgcactatgccaaggacacctaggtgagcattggcactgggatatagtcagctgttaatacttatacggtacccttgacagaaataccaaagactgttcattaggaaagcatattttttttgtgctaagctcagctttaataggattctaaatatcaagggtacactaagaatatctaggaacctccacaaatcaaagtataacaaccataactcaatctgctacatcaaaatgtctattttggaagttactgtttctcaaaacaaaaatgactaaatttagttggtttcttggtgcgtaagaaaacgtcctgcttagatgtcccatcagaaataaggctgccatttccaacagcgttggaaaagcacttagcttatcaaacagctgatcttaacagtaggcaacatttaaaaaaaaaaaaacttgttaaaactataccatgaactgagaacacaactcgtattcagatttcacggttatgaagattaacaactgttatattcaactgttttcgacattgataaactcatacggagctagttataagtacattgagatgctttacaggcaaagatttttaacaagtagattcataaataaccgtctttgggaagcagtgaccatgtaaatctcaaatgtgaacagcatggaagtagggcgataggtttcagttaggttctaggtaacgtttattgagtgattgctctggaattgataaacttcgactggtggaaaaggcaggaaagcaactatgatkgggcataatgaaattaattccatatggaggtatgggcagcattgtgttgaaatacacaagaatgtctttcatgtcagccttgtaatattttcacaataaccttggtgattaatgacctaatctcttgatttgtccctctgactttttaggtccttygaccaagctgcacagtagctccatattaatttcccttaaaaatgttttatggctatcatacattttataatattaaatataagatttactttttgagaataataaaatgaataccttcatgttcctctgtgtcttctttctccttcccacacccacccactaccacgtattttaagattataatgtatggtatttatataggactacctggcaaggcataatccttaaagacccttttcatgcattaactcatttaatcctcacaataaccttctgagattggcattaatatttcctttttcaaatgagcaaaatgaggcacagagaggttgagtcaaagttctctagctagtaaatgacagtatcttaatgggctttggatttaatgggttttgctgttcatttgtttgccagatattagaaacaatcttgtattcattgttatatgctgtacatggcaaatgtttctctagagtgcagttctcgaagtatggtctcacaacccttggagatctccaagaccctctcagagtctacaagatccttctgtaatgaccacgtttgtggtagactagatctttaataagtcaaacaaaataacatatccaacagagcgaatgcagaactagataagagaatccagcattctttttttaaagcaaacattaaagagatctgcagaaatgtaaaatagtgccattcttttcactagatcttttagagtgtaaaggggtcctgagagaaaaagtttgcaaggggcaactctagggcagtgatttttcttttttttttccagaccagaggctgggctctggattacagctcagtagtgggtcatggaatatgtactgtgactcaacccgtatcattttcaagaaagaagagagagaaaatcgttcagcaaatataactgaatgaattatctggttcacagagtatgtgcgtcttcagctttactcggtcatactaaattgttttaccaagtgattataccaacaaccctctttattttatgtcctcttaaatggatggtatcgtcccacttgtaaatttttgctgtgtgtgtgaaatggtatcctattttctgatttgtgcacctcttatcattggtgagtatgcaccctgtttttttcaaacctttactagtgtgtgtgtgtgtgttcttctgtgaaatacctgttcatgtcctttgcctgtttttgtctgttaagactgttccagagacatcttggctggtctttgatatctttcgattaatagttgttgttacttttaatgtaaaatttgttagtctttttataattagtgatttctgtttaagaaattcttcctttctccaaggccttggttgtattcttctatatttttttcctacttattttaaagttgaagccttttatgtccttaatttacttgaaattaatttgtatgctgtgagatagggatccagtgtaacrgttttacttaaaatacacaattgtccccacactacttgttgaaaattcatcctatccccaatggtttgcaatatgttcatttccatatgtgtatgggtgtgttacctggctctttgtccctttgttgtatttgtctctcctacttagatacccacttggaggtrggggggtcatttacctccttgttactcaagagaaatattagctattgttggtcctttgcttttcttcagtagaaattctggaacctgctgttggaattttggtttagattttattgaatttctagcttaatttgggtgtaactgatacgtttaggatattgacccttctgtctgaatgttatgttactccatttatttagaactttaacatttttcagtacttgtataatttcatgtcttgtatattgttcagtttatttctagtttttaattgtgtgatatatattttcataagttgcattttctaatatataaaattactgactcttacatatctattttactcagcaatcttccagacttaattctcataattgaggattttttgttttgttctatttagtcatgatacgaaaytgggattcttccttttcaatcttaatagctgttattcttttttttttttcttagtgtgcagactagggaaatgaagtacaatgttgacyagaattgatgtaggtatctttgtcttactcctgattttaaaaggaatatttcaagttttccaccattaagtatgtttgccatcttttcttgtaaaacttcatattatcataaggaagtaagttttttaaaaaataatggctggatgttgaattttattgaatgcttttctacatttgttgacgatcgtattgatatttagtttggaactgttgcattgattgcactgctcagagctgtacatcatgttcctccaccattggaccttgacttctccaattttatttcctcaacatgtgtacacaaactctttttttcagctaaactgatgtattcattaacctggaaataattgccttttatatccatttctagcttgcctatcagaatacatgtcaatctacaagacccagtatcgatttcagcactaataaagaccttcctttaccatactgttttgaagcagtgttctgttgaatgcatctgaatttaatttgcacttagtctctattacatccaatttaccagtkcccacctactgttttgtatttgagttttatctaggtaatatcttgcagctgtgttgcatgtgccacttataaagaaagcaagtaatatgcatttttaaattatgcttcatacttcacacagtgtcataaaaagatgttcaataaatatttgaattatgtgttcctaaatgagatatttgccctaagaactaaaggctgcaggaaaagctagtgatcaggttaaacattttgcctttaatcctgaaagtttctcctacaatcatattttggttggaataatttttactgaatgcttagggtcatggagagattagtggattgggagttagaattgggctcctttctacgcagccttcctatgatatttgtgctatttgttaaatataaagaagcccaaaagcttttggtgatctcttaaagggttgtagtgattttgttgaaaaggataatcttttataagtaatgtgcagtttcctgttttgcggaggaaatgtatagttaatattcaacagatttattgaacataataaaactcctttattagaacttaatttctccagcaaaaattctacaccaactgggtgtactacaattattttaattctgacactgcccagatgttgctcagacccccatacattaaggggctccgtttcacaagactgcctgcccccaagtcagtcagagttcgcagagcatctgcatttctgctcagctgactacaaattatgggattcctgcagctttccaagaacggctcacagtactcaggaaagactgttcttaagcaatttcagttttataaaggacacaactcagaaacagccaaatggaggagacatagggcaaggtgtgaaagggcttctgtatcctctggtgcagsaccttcccagcatatcagtatgttcaacaatctagaagctccccaaacctcattattcaagagttttcattgagctttcattacataaatacataattgagtaaattattgtccgctggtcactgggctcaatctgtcccttacctcccctaaggtcagggcctagggctgaaatttgtgactcttcccccccaccccacccccctcccaacacacacacacacagacggagtctcactctcttgcctaggctgtagtgcagtggcccaatcttggctcaccacaacctccacctcctgggttcaagtgattctcctgccttggcttcctgagtagttgggattacagggcacacccccacacttgactaatttctttgtattttagttagagacagagtttcaccatgttggccaggctggtctcgaactcctgacctcaagtgatccgcccagctcggcctcccaaagtgctgggattacaggcatgagccaccatgcctggctgaaatctgtagctctttataatctagtggttggtttttctggcaaccagcttccagaagatgccttcaaacctgaagctacctaggtgccctaccttgagtcccttcatcagcctaacaaggataccctatcacttaagaaattctaggagtttttgaatctgtatctgaaaccaaggacaaaagactaaatatattttttattataccacagggcatacagataataaaaatgtrtatgtcatgaggagtgatataaaatagtaaagggcaagcccactaacatacaaaatgtagaacagaggtagttccatttggggaactagtttgttagttaatcacatagttaatgggattcccctgactgggcagagggtggtcggcaagtcacttaatatttttgaatattaaatgataggattctggtgggttgtaaataaccaatgaaaacttgaggttctctgtgacatttaaaattaagctatgcagtaattgaggatgctttgcaagacctttgacaatattataaagaattgaaaactcatcctattttccagttacctgtaaaaccagatgccaatttgccattaagtttggaaaatgacaaatactagtctttgttatatatgaacatactatagtagacttagcacttatttatttgagtaccacttttaagacttggccctaccctcctaagctctttgtccccacttttgattgtcatagccatagtgtgttttatatttatataaatagaaaatgttttatatttgctttcttaaatcacctggaaatttgcatgatttttaacatggaagtaaaatctttaattttaaataagatttaaatacagtgcaggtatttcgatagcctttgtttcaggagattgtttactgttttaaatattcattgtgctcttgtacttttatgaacacggattattctggtaaatgtaaatcttcaaaggtaagaattgaaaaacatagtttgctgtggccgtttgaggaaggaaagtggatgaacattttgaatagctggtagtcatatcttccaccttagccctcagcttcttagttacttcccccagtctaggaccatctgtcagtaggaagtcrcctacaacaaataaaactccacagttagcatctcctgggttgaaattattatgtggaatcctaaatttaacagaatctcattcatgacagaatggtgtactgtggaaataaagttttatgtttgagtgtttgatgggccttaatgttttctaattattttcttttttgttaattaaatgtaaagtatttgaggcaaggacagtgccttattttctttctggagttttgaatactataaatattcaagtagtagtttgtggatggggaatagagtaattcagtcatttgtagcagtttctggtcctgtaaaaataatgtttttatttttctgaacgtatatttcacagtatatatttttaactgcggtatttacattcattgtatcatttaagtatttctgcacagcatttgtattcargttgtatgaacattattttcttcttgtgtctggcatatggctatattcagactaatatgaaacactttaaaagttgtatttctttaatgattgaattgtattgtttctagtcagtggattttttctgttgtctgtatggacagtcaatctcagtcataaatatttgtgatttaaatctgctatttgtggttcacacttttgaaaggtaatttgtgtctttattttttagaacagctttgctgagccatcaaggtctaatggaagcatggttcggcattcttcatctccatatgtagtatatccttcggataagcctttccttaatagtgatctacgacgctccccaagtaagcctacacttgcctatccagaaagcaacagcagaggtaatcgagcctaacgaaataaatgttatttgtgttttcttgctgctttaaaattcttaactttgtcctccattattttgccattagaggaaaatatatttcccctttgcttccagtttcagcccccagaaaatattatgcttttcttgtattccttatattgattgttgaacatcatcatccaccaaattactgatgctaaaacactttgagtcatcagtgactgctctgtaatccccactattagtccggaatgaagacctttttttgcttctgaaatataccaaaagcatactgttttttctgcctttttgtgttctcattgctttggttcaggctttcatcatctgtagcccagatgttcatagtacattcctcattaatctccctgcctgttttctcctcctcatccccagttaacaacatttctgtcatttgtcattatccatcatctctcccacaaaattaaagctttagcatctcttcatagcttacataataaattcttaatttttcataacctagaccctatatgcctcaccagcttcatccctaacttgtcttctgttttttcctttcccatcctttgctctggctactttgaaatacatttattcctggaacctgccatctgtattagttttcttgtcgccttaacaaattgccatgaacttagctttaaatatttgttatctcagttttctgtaggtcggaaatctgtgtaggcttatctgggtcctctgtttagagccttacaaggctgaaatcaaggctttgcttggggctctgttctttactagaggctctggggaagatctgcttccaagctcattaagattcttagccaaattcagttccttgtcattgcagtactgagattctgttgctttgcagacttttacttgaggacagtctttgctcctagaaactgtcctccttccttcatgtttcccttattgtctcctacggtaacagtaggtagtctctcatgtttcttttttttttttattttttattgtttttttggagacagagtctcactctgtcaccaggctggagtgcagtggcgggatcycggctcactgcaacctccgcctcctggattcaagctattgctattctcttgcctcagcctcctgagtagctgggactacagacgcgcccagctagtttttgtatttttagtagggacgaggtttcaccatgttggcccagatggtctcaatctctggacctcgtgatccacccgccttggcctcccaaagtgctgggattacaggcatgagctaccgcgcctggccaagtctcttatgtttcaaatctctctgagttctgttgttacatttctctaaccacagcgggagaaaattttctggttatgttatcagattgggcccactcagataatgaaaagatggttttgatattgaatttgttaatcgtcttttagatgtttcttcatctgtatcttttaaaatacacctacctcatactttgtgtgaagtttaaatgaaatatctttgctttatttgggatgctgtggcatttcctttttttgaaagttgtgtttaatcactaatattgcaacaattctatgtgttaatgattctctaggtaaaagaaatatttttgacatcgtaggctaaacaggcatttgtaaattagttgaggaacattttttgtttcagttgggatatatattgtaagtatcctaaaaatctcagaatgaacctgttttgtaaactggactgattgtacagtaaaataccaagtaggtaatgatatccaaataccagcttaaatcctaacctataatgggtgctgaaaagtgtttactgaaataaaagtaactaaatagtgtgatgtcttttaagaattttagtactctrtaatcactaacctagaagcctctttattataagatactgtgtctcgatgataacgaaaatttttaattaatggttaaagcaactgataaggttctacacatcagagtatagcaggttggcaatttaagaaaawtaagttgcatgacattcaaacaacatagatttwaaaaagcaaaaaaaaaaaaaaaaaaatgactgaagcccacagtagagcaaaaatcagttgcagtaagtttcttattcaaaaataagcacaaaacaaaatatccatttacaaagttctaacaggaacacaaaatctaagaattagatattaatccttcaactataatattgtatctagttctgatctttacacccatgaaaggaaacttttaaaaagttcaaaaaaatgacaaattactagcaaagaataagaaatattaagaaggcagatttattcaccgagaatcagaaaaattttagcacagcatgttactaatagagctaaattctgcttgagtgcaacatcagtggttttaaggaataaaagagaagtgagacaagcagggaggagacggagaggagaaataaacaagataaaaagtaacctttaagcttttatgcctttagagcatgatgcggtgaactatttaagcaatgtcccaggataattattataatccattatccttttatagtgttttaatccaacgatacttactttccaaatgggaaggaaagacacagaaatcactatccccttctcacccagaaaaaaaataaaggctgtgagatatgaacaaagaccaagagagttcagaaaagacatttgttggggatagggataagtgtgttggggaggttaaaggagaggaaaacctctcagaggaaaaacgaaataatagataatctgagttttaaagaatgagcacagttctataagaagaaaagttcaacaagagtacagcatgtgaaaggtttataaacgtgayatgatttttttttttttttttttgagacagtctcactctgtcacccaggctggagtgcggtggcatgatcttggctcactacaacctctgcctcccaggttcaagcaattctcctgcctcagcctcctgagtagctgggattacagacacatgccaccacacctggctaatttttgtatttttagtagagacagggtttaaccatgttggccaggatggtctcgatctcttgacctcgtgatccgcccacctcagcctcccaaagtgctgggattacaggtgtgagccaccgtgcctggcaaacctgacatgatttttattgcttcatcaaggacattgtggcttagtttttcttactgggaatttatgacagtgaagaatacaatgcctaaaatagtagtttagtgttactaccttgatttgagctaaaattaggaattttacccaacattgcttttgcatgatcattggcaaacttcaacacagtgaaaaaagtgaagtcttactattaatagtattatgaaaatagtgttgacctcacaggccctgggaaaggcctcatgagctctgccctcaatgtgcctatgccccatattttgagaaccactgtaatcaaggatatgagtatgtccagagtagtattttgttcatgtaaatacttttttaccaggtgtgagaagaatgtagatagtagcatttgttccagaatctagatgatagctccttgaggccaaagacagtcttcacgccttgcagagtgcttcacacattgtatgtggtctatatgtttgagggactgaggtttacatcagaagtaagtctaaactgaagcaacaagacagaacaggagactgattaaggaaagatttatgcatattttgttgtggggaatgaggaagatggagaaatctttgagtctaagatttctagtgaagatgattaggggtatgattaggacagatgacacaaaaaaagcatacttagaggaattgatataattttggctgtatcaaatttgagatgcctgtgaattagatggagatgaatactaagcaaatgaaaattaaaaagtcaagtataatagagaacactactaatgaactcagacatcatcaaggatacagtagtggatgaagcctatgagtatagaggggtttctccagaaaaagaaagtagagggagaaaagggctttggaaaataccaccattaaaacagtaaactaaaaagtaggaaaagtcagaaaggtggagaactaccaagacagcaatattagagaaatcaaagatgcatattacaggtttggccccygcccccccgccccttaatctacaacaacataaacctgtgtttatgttaatgacagaaatgtcccmagcaataaatagacccaggtggacttgaagaacattagggactcaaacatggctagcactttccatcttttttttttttcrgcttgtaactagcttcattttttctagctacaaaagagctttttttttgcctagcaggaaacattactaaaaattactgagttttaagttgaaccagttctggctttgatgtttcggacaaaagtcccaagaagacaagcaagcattatctgggtttcagcgtgtgtcccttgtggatcagttagccagatttgtcaaaggatagtaaagttgtaggtatagccatgttgaggtaaggggaaactcccagaaaaagaggtatataagtcagggaaacagttccaaagatgtgtgctatacttcatatagcaaaataaaagaaaaatttcaggaaacaaaattaggaaatacaaaatataatgaaaaatatgaaatttatcaggtatgacaaatgtgattacgtcaactcaaaagccaatatatgctttttaagtaaaacctgaaataaaatgaaacaaaaaataaatagctgacaaaggtgtttactrccatacaaataaaaacgatggatggcagtactactgtcaaacagttagtataggcaaatagcagcttcatgtaatactaaataaaaacaaataatacctagtttaaaagtgagaaggagaaatacccaagtacagaaataaaatgagtttcaagccaggacagtaaggatggaactaaagcctaaaaccttagggacagtattaggagtcttggcattaggtataagccttaaatgttggggtacagtagcagagatgatggaattttaaatgtgggtagcgactggagaacaaagctctaggcgcccctgaggcaacttctggaatactttgaaaaggtgggcgtgatgagagttgtcaaagcagaactggaacactgcggcccgtggtctcaggaagagactggataaaaaaagtcacctctgataagtcaactcaagccaattttatgtgcttactgaggtgcataygtgaagacttgaatacataatgagagctatacattgttaatgaaaatgcttaatattataaattgcatttaaagtgtgctcatatataaataaatatgacatagtaaaggtcaatctcacatataaaagcatttttaaaatctatagaatttcaataaaatgtttataattactacatctagatggtaagattatgggtgtgatttttttccttttcaatcatgtgttttctaaattatcctctgcatttattcagtaattttttgaaaaagaaaacaataaaacgttacgcatttaaacagggatatgtaagccattcaagaatacataaaacaaaagtgcacaccccagcatatccttgtgatactacagttgctgacataaagaacaaaaatgaaatgttcagccagtttcaataataaatataagtgcagaaataaartatcagcaacattgtgtactgttgggtataatttaatgaaggagtgcaaaaaatgtttgatattacaaagtctttagtgaatttgcctctgattcagaagaggttaagaaaactcaatggatattaaaggacgtttaaaattttatttttctattgtacttatctgattattgcaggtatataaaagaattgttccctttattattaatcttatatttaggcttctgtttagttctgagtgtcttttcagttgatttttcaggtttcttcctgtgtgtgtgtctgtttcatgtctgcattttttctagttatattgtagtctcattgcataccagcaagaataagctgacttyrataaaatgtattagtctcctatttgagacctgtaatatcctaggcactgaaaaatttggtgaaggaataaattatgttaataaatggacaagaatactttgggttgagtaagaggactcaattcgtaaaagacggcagctctccctacctagtrtatagtttaaattagtgtttagacaaaatgattctaaataattacttggaaatgttttaagatttatataatataggtgactgttagaatcaatgtttatgaaattttagtaattgaaatactggcactaattccctaacattaaggaatccagaatagaagaaagatctgaaactgtcttagggtgtgtatgtaacaaagagttacagtatctaatatatatatatatgtgtgtgtgaatttagtgtatgatcaatttgacatttaaagtttttctttcaatacaaaaacactttttctatgacttaacaaatgtaaacatatgaaactgtaaatataatttwaaaaatacaaagtttatctgatctcgaggttgggaagaactgtccaagtatataaagaaagaaaacatgatgggaggaaacaccacacccaagactgtgttgttaaagcactgatgacttctgacccaattataaaagtgaccacaaagccagcttgcttttcagagttcaaaagaaccatcctgtaatctgtaagatatttgagaaaaaatcctagtcttaatgttcattttctttaagtgctttttggaagtaagctgggtataattaataaggaaataaagaacaacttggtccggttccaagatggccaaataggaacagctccagtctacagctcccagtgtgagtgacacagaagacgggtgatttctgcatttccaactgagataccgggttcatctcactggggcttgtcagacagtgagtgcagtccatggagtatgagccgaagcagggcagggtgttktctcacccgggaagygcaaggggttgggccattccctttcctagccaagggaagccttgacacacagtacctggaaaatcaggacactcccaccctaatactgtgcttttccaatggtcttagcaaacggcacaccaggagattatatcctgttcctggctctgagggtcccatgcccatggagcctcactcactgctagcacagcagtctgagatccaactgcaaggctgcagcgaggctgggggaggggcatccgcaattgctgaagcttgagtaggtaaacagcggtctggaagctcraactgggtggagcccaccgcagctcaaagaggcctgcctgcctctgtagactaacctctccgggtaggccatagctgaacaaaaggmagcagaaacttctgcagacttaaacattcctgtctgacagctttgaagagagcagtggttytcccagcacggagtttgagatctgagaayggacagactgcctcttcaagtggatccctgacccccaagtagcctaactgggagatacctcccagtaggggccgactgacacctcatacagccgggtccccttctgagactaaggctccagaggaaggaccaggcagcaacgtttgccattctgcaatatttgcttttctgcagcttccgttggtgatacccaggcaaacggtctggaatggacctccagcaatctccaacagacctgcagctgagggtcctgactgttagaaggaaaactaacaaaaaggacatccacaccaaaaccccatctgcatgtcaccatcatcagaccaaaggtagataaaacgacaaagatgtggagaaaccaaagcagaaaagctgaaaattccaaaaatcagagcacctcttctcctccaaaggaacacagctccttgccagcaacagaacaaagcttgatggagaatgactttgacgagttgagagaagaaggcttcaaacgatyggtgataacaaacttctctgagctaaaggaagatatttgaacccattgcaaagaagctaaaaaccttgaaaaaagattagacgaatggctaactagaataaacagcgtagagaagaccttaaatgacctgatggagctgaaaaccatgccatgagaactacatgacgcatgcacaagactcagtagccgattcaatcaagtggaagaaagggtatctgtgattgaagatcaaatgaatgaaatgaagcgagaagagaagtttagagaaaaaagagtaaaaagaaatgaacaaagcctccaagaaatatgggactatgagaaaagaccaagtctgcctctgattggtgtacctgaaagtgacggggagaatggaaccaagttggaaaacactcttcaggatattatccaggacaacttccccaatctaggaaggcaggccaacattcaaattcaggaaatacagataatgccacaaagatactcctcaaggagagcaactccaagacacataattgtcagattcaccaaagttaaaatgaaggaaaaaatattaagggcagccagagagaaaggtcaggttacctgcaaagggaagcccatcagactaacagcagatctctcggcagaaactacaagccagaagagagtgggggccaatattcaacattcttaaagaaaagaattttcaacccagaatttcatatccagccaaactaagcttygtaagtgaaggagaaataaaatcctttacagacaagcaaatgctgagagattttgttaccaccaggcctgccttacaagatctcctgaaggaacaactaaacatggaaaggaacaaccggtaccagccactgcaaaaacatgccaaattgtaaagaccatcgagactaggaagaaactgcatcawctaacgagcaaaataaccagctaacatcataatgayaggatcaaattcacacataacaatattaaccttaaatgtaaacaggctaaatgctccaattaaaagacacagactggcaaattggataccaagagtcaagacccatcagtgtgctgtattcagtagacccacctcacatgctggggcacacataggctcaaaataaaaggatggaggaagatctaccaagcaaatggaaaacaaaaaaaggcaggggttgcaatcctagtctctgataaarcggactagatcaaaagagacaaagaaggccattacataatggtaaagggatcaattcaacaagaagagctaacctaaatatatatgcgcccaatacaggagcacccagattcataaagcaagtccatagagacctgcaaagagactcagactcccacacaataataatgggagactttaacaccccactgtcaacattagacagatcagcgagacagaaagttaacaaggatatccaggaattgaacttggttctgcaccgagcgaacctaatagacatctacagaactctccaccccaaatcaatagaatatacattcttctcagcaccacatcacacttattccaaaactgaccacatagttggaagtaaagcactcctcagcaaatgtaaaagaacaaattataacagactgtctctcagaccacagtgcaatcaaactagaactcaggattaagaaactcactcaaaaccactcaactacatggaaagtgaacaacctgctcctgaatgactactgggtgaataatgaaatgaaggcagaaataaagatgttctttgaaaccaaygagaacaaagacacaacataccagattctttgggacacattcaaagcagtgtgtagagggaaatttatagcactaaatgcccacaagagaaagcaggaaagatctaaaattgacaccctaacatcacaattaaaagaactagaaaagcaagagcaaacacattcaaaagctagcagaaggcaagaaataactaagatcagagcagaactgaaggagatagagacacaaaaaacccttcaaaaaatcagtgaatccaggagctggttttttgaaaagatcaaaattgatagaccactagcaagactaataaagaagtaaagcgagaagaatcaaatagatgcaataaaaaatgataaaggagatatcactaccaatcccacagaaatacagactaccatcagcgaatactataaacatctctacgcaaataaactagaaaatctagaagaaatgggtaaattactggacacatacaccctcccaagacaaaaccaggaagaagttgaatccctgaatagaccaatagcaggctctgaaattgaggcaataattaatagcctgccaaccaaaaaaagtccaggaccagacggattcacagccaaattctaccagaggcacaaagaggagctggtaccattccttctgaaacaattccaatcaatggaaaaagaggtaatcctcccaaactcattttatgaagccagcatcatcctgataccaaagcctggcagagacacaacagaaaaagagaattttacaccgatatccctgatgatcattgatgcaaaaatcctcaataaaatactggcaaaccgaatccagcagcacatcaaaaagcttatccaccaagatcaagttggcttcatctctgggatgcaaggctggttcaacgwacacaaatcagtaaacgtaattcatcatataaacagaaccaaagacagaaaccacatgattatctcagtagatgcagaaaaggccttcaacaaaattcagcagcccttcatgctaaaaactctcaataaactaggtattgatgggacgtatctcaaaacaatatgagtgatttgtgacaaacccacagccaatatcatactgaatgagcaagaactggaagcattccctttgaaaactggcacaagacagggatgccgtctctcaccattcctattgaacatagtgttggaacttctggccagggcaatcaggcaggagaaagaaataaagggtattcagttaggaaaagaggaagtcaaattgtccctgtttgcagattacatggttgtatatttagaaaaccctatcrtctcagcccaaaatctcctcaagttgataagcaacttcagcaaagtctcaggatacaaaatcaatgtgcaaaaatcacaagcattcttatacascaataacagacacacagccaaatcatgagtgaactctcattcacaattgcttcaaagacaataaaatccctaggaatccaacttacaagggatgtgaaggaccccttcaaggagaactacaaaccactgctcaatgaaataaaagaggatacaaacaaatggaagaacattccatactcatggataggaagaatcaatatcgtggaaatagccatactgcccaaggtaatttatagattcaatgccatccccatcaagctaccamtgactttcgtcacagaattggaaaaaactactttaaagttcatacagcaccaaaaaaaacagcccacattaccaagacaatcctgagccattaaagtgatcattaaaaagtcaggaaacaacagatgcttgagaggatgtggagaaataggaatacttttacactgttggtgggatcgtaaactagttcaaccattgtggaagactgtggcgattcctcaagtatctagaactagaaataccatttgacccagccatcccattactgggcatatacccaaaggattataaatcatgctgctataaagacacatacacatgtatgtttattgcggcacggttcacaatagcaaagacttggaaccagcctaaatgtccatcaagactggattaagaaaatgtggcacatatrcaccatggaatactatgcagctgtaaaaaagattgagttcatgtcctttgtagggacatggatgaagctggaaaccatcattctgaacaaactattgcaaggacagaaaaccagacaccacatgttctcactcataggtgggaattgaacaatgagaacacttggacacagggtggggaacatcacacaccggggcctgtcgtgggttggggggaggggggagggatagcattagaagatatacctaatgtaaatgatgagttaatgggtgcagcacagcaacatggcayatgtatacatatgtaacaaacctgcacgttgagcacatgtaccctagagcttaaagtataattaaaaaaaaaaaaaacgtgatgggaaagaattaggtatacctctgtgaaaaatcaaaacatctgtacatcaaaactagaattaaaggcagataataaaatgaagaaaactttttcccatagaaaaatgggcaaaggaaattcatgaaagggagaaaattagccaataacatatatgaaaagatttatactttgatggaaatggaaaataactaggagtagcatatttttctcattagaatggctatgattcttctttgacccagtaactttttagtttttaattattgatcattagaaaatcttttaagactgattgcctgagggaattctcactatttaataatgctaaagtgaaaaaacctacatrtdtgttttgtctcaatttattttacacatataggaaaaaatttaaataaccaaatgacrgtcattatctttgggtaataggattattggttatttttcagtgtgttttttctcagtcttctacatttactgcagtcaacataattttataatcaaacttgaagcggactttagaaagtacttaaaatgcggattttaaaagtattatttttgtgtgcttgactgtaackctatagttggtttctacatgtgctcctaytaataaaatgtattaataagtaatagttactaatacatttactaattttaattaataagtaatatattaataagacagtaatgtactttaggactgttatgtgaactttgtatgattggctaaattttttaccactttataaaagtctttgaaatttttttaccatagtaatggggtttttacttgagcacatttcaaacactcaatgtctttttttwaatttattattattttttgtgagacagaatctcactgtcgcccaggctggagtgcaatggtgcgatctcagctcactgcaacctccacccctccacactccccaccccacccgggttcaagcgattctcctgcctcagcctcccgagtagctgggattacaggcgcccgccactatgcctgcctaattttttttatttttagtagtgacagggtttcactgtgttaggctggtctcgaactcctaacctcaggtgatccacccacctcagcctcccaaagtgctgggattacaggtgtgagccaccgcacccggcccactcaatgtctttaaattgattttttaaaaaacaaatatgagataattaacattttattgttcccaaagagtgatcctccactggactcatccatcaattttattttttatttagatgagtttattctttcttaatatactttctccgcatatgctgttacagcatccacgtttgtgtttgtatttggcagccatattttctgctcttaagaatcttcaagataagattcgacgcttggaacttgagaggattcaggcagaagaaagtgtgaaaaccttgtctagagaaacaattgaatataagaaagtactggatgaacagatacaagaaagggagaattcaaagaatgaggaatcaaagcacaatcaaggtttgttgatgaagaaaattaaaattctatcaaaataagtgttgtgcagtattaagtattctaaargaaatagtacattagtgttttgtagcggtatcttcaagtactacaaaactgcattgtattctggtgcattttgaggagcaaatgctgttgtcatacatggcatttatttactgaatgcaaggccagtttgactagcacgtagaaagaatgatttaggtaatctgaaaaggcgtccaggtctgtggaaggtgtttttattgtatacacaatagatccaattcctgttaacagcttgttaaaactattttatgggtgagttgatttctgcttttcttatgtattctttttagaactgacatctcagttgttagctgcagaaaataaatgcaatctattagaaaaacaattggaatacatgcgaaatatgataaagcatgccgaaatggagaggacatctgtcttagagaaacaagtaagtaaagcacctcacagattgatactcaagaacagytatggggaaaactaattgaataaagactttttttctttcggtgaggattaatggtgctgttacagcccaggactgaaatttcttggcatcagttatgaaatctaaatatgtgattggctttttcttgttgttattgttgtgtttcgtagagttttacttaaatggtaaaaatacagttgtgagatgtttgaaagttatgttagcttctttgagtctacattataaaaagtgtaaataaccatatacctctgtatctctgaaatttgtttaatgactccagtgagatagtagatractttgtaaaactcttcagaattgttacttagcatagcatttttgtgctttcttacaccagagatcttcgtatttaggtgacctgtacatttgtgagaagatatctcaacatcagtctcaaatatattgattgatcaattgattggawmtcactskgtctcactctgtcacccaggctggagtgtagtggcatgatctcggttcactgcaacctctacctcctaggctcaggtgattctcatgcctcatcctcccgagtagctgggattacaggcgcatgccacgatgcccagctaacttttgtgtgtgtgtgtatttttagtatagatgtggccaggctggtctcaaactcctggcctcaagtgatcaggccgcctcggcctcccaaagttctgggattacgggcatgagccactgtccctggccttgtgtgtattttttttttttttttttttgagacggagtttcccttttattgcccaggctggagagcaacggcgtgatctcagctcaccgcaacctccacctcccgggttcaagtgattctcctgcctcagcctcccaagtagctgggattacaggcatgtgccaccacacccggctaattttgtatttttagtagagacagggtttcaccatgttggtcaggctggtcttgaactgccaacctcatgtgatccgcctgccttggcctcccagagtgctggaattacaggcatgagccaccacgcccggccagccttgtgtatatttttttaaaacttactcctttttctgttatgaatctagagtttgcattcattagttttgtagacatcttaactctattataaaatcggawtgtttatatgcttaacattatgctagatgccctgcaatggaaaaaaaaaatactaggcagttgtccttcagtatccatgagtgaattggttctcagacccctgtggatagtaaaatccatggatgctcaagtctcctataaaatggtgtggtatttgcgtataacctacacccaatctcatatactataaattatctctagattacttataacacctaatgcaatgtaaatgttatgtaaatagttgctgtactatattgtttggagaataatgtcaagagtaagaatctgtgtatgtttagtacagattcaaccatccttttttgttttttctcgtatattttcaatccacagttgatcaaatccatggatgcaaaacacacagatacagagggcttaccgtgtatgctttctaccctcagtcagctttcrgttctcattggagagaattagacttaaatatttgagcaatcatacaacagtatttgagaagatgtctcagtaattaattcttgtgtgtgataggtctcttatttcagtggttataatttttcattttcatttgggtctttttccatccacttagttttgttctttgaatgtactgttactctgtggtttttataccttccttctatctytttgaacgctataaacaattcycaattttttttaattatttgatgttttcaaagtgttaatcctcgtttgtttggctttatttattgattctcccttatggtatctttttttttatgggaacttaataaagaaaagttatatggtggtctcattttttcatttattgtgttaattccacaataaattcctcagttgtgtgggcagccttgtgagccagttgtgaatttgccttkggttaggcttgatggttttcactggttctggctgggcagggtggcttacacctgtaatgccagcacttaggaggccaagccagacagatcacttgagtgcaggagttcgagaccagccggggcaatagagcgagacccagtttctacaaacaataaataaataaaatcactggttctgttccagatttatgttactatattggcttgatattgttgatcattgtggattatacattgcctaaagttttatattcctgcacattttatgtaccctggctccaatattgccttgtgtgatatttgacttcagtatcctttcatttgcttttgagttcctttctcttttttttgtatctgaagattttcctttcttgctttcaaaattgctgtgtaattgtattagtccattctcacgctgctataaagagcacccaagactaggtaatttatgaaagaaagaggtttaattgactcacagttctgtatgtctgttggggggacttctggaaacttaacacttatggtggaaggggaagcatacatattcttcttcacatggtggcaagagagggaagtgcagagcaaggtggggaaaagcccctattaaaaccatcagatctcatgagaattcactatgatgagaacagcatggggaaccaccacgatgatctaatcaccttccatgagatccctcccccaaaatgtggggattacaatttggattacaattcaagatgagatttggttggagacacagaggtagaccacatcaataatcatatattattattatgtctgctgtgtttatctaacatttctgtgatttttgggctggagaaaggggtcagtttaataagacaactttaagatgttttgactaatatatgtcttggagacaactattaggcatatgtaatagatgtcaagagctgttaatatccactaggatgtggctagaagggaattagttcacacaaattcctaaattattgctttatattaatttgtcatattcaaatttctattaatatggtacctattgctgtagccttattttgaagacacagtttacaagttcaggcactttttaccaataatagtccttgagttagtatatttgaaattatcctagtataatggtttacgggtggattacttgaggtcgggtttgagagcagcctggcyaacatggtgaaaccccatctctactaaaaatacaaaaattagctgggcgtggtggcaggcgcctataatcccagctactcaggaggctcaggcaggagaattacttgaacccaggaggcagaggttgcagtgagctgagatgatgccaccgcactccagcctgggtgacagagcaagaccccatctcaaaaaaaaaacaaagtctatataggaggcaatctttataaatctttgactctaaacttcaaaaaaaaaagtttagggccaggtacggtggctcacgcctgtaatctcagcactttgggaggctgaggcgggtggcttacggggtcaggagagcgagaccatcctggctaacacgatgaaaccacgtcactactaaaaatacaaaaaattagccgggcgtggtggcgggcgcctatagtcccagctactggggaggctgaggcaggagaatggcatgaacctgggaggcggagcttgcrgtgagccgagatcagccactgcactctggcctgggcgacagagcgagactctatctcaaaaataaaaaaagtataaaaggatattatacatagaattcaagggaaatatgaaaagatagataccaaaaccataatttttaccctaattaagagattaactacttgacaggaccaaactaaaagtatttgtgtgtgaagcctatatgtccaataaatccctgctatcccagagcataaagataatgtcactatataaaactacatattaggtaaatagctataagccaaggcaactgagctaagaacagtatccacttatatcagtcatttattgatgscccctatggtttcatcttaatgttattttcytagaagtagttatgtgaagggccaaataacagcatagaaaaacactgctcagtgtttttctcttttttgattgtcaaattatcaagccgtattgaatattgtttttcaggtttccctagaaagagaacgacaacatgatcaaacacatgttcagagccaacttgaaaaattggatcttcttgaacaggagtataacaaacttaccacaatgcaggcccttgcagaagtcagtgcatgtgtctttttattgttaacatatatcagggtggtttttttttaatgttaattattttayatcactggatatttatagcattaaaagtgatcttataatgaagaaatatattggagttttaaaaagaaaatataaatttggagagaatgttcacattttacaatcttggtgggcatttttttttatgaaaatgtttgttaaaaaattaaatgtttttggccgggcgtggtggctcacgcctgtaatcccagcactttgggaggccaaggcgggtggatcacctgaggtcaggagttcaagaccagcctgaccaacatggtgaaaccccgtatctactaaaaatacaaaaattagccgggcatcgtggcgcatgcctgtaatcgcagctgcttggaggctgagacaggagaatcgcttgaaaccaggaggcggaggttgttgtgagccgagatcacgccatttcactccagtcagggcaacaagagcgaaactccatctcaaaaaaaaaaaaaaattaaatgtttttgagtatccttaaggcttgcatcacttggtttaagttgctctctgagctaattttagttttaattatttcatttgggagatatttaataccactgataataaagttccagatttagcctccctatccctctttacattcatgcagtgctgtgttctttggccatagattttacccataattttgtccagctacctcacagatgataaataattgaacacaaaaggagagcatcatggatgccatccagctcacagcctccattactacagtgatctaaccaccttatattgagtaggataaaatttacatgttccagtgctgctatattaaaattttacagacacttaagatttttcacctttatcccttttgacatttttatcactagaaaaaaatgcaagagttggaagcaaaactccatgaagaagaacaggaaaggaaacgcatgcaagctaaggcagctgaggtaagttaaaatgtgagaaagtgggctcttcatatttcttaccgctttttgtgtacaagtaaacaattacatttaggtatcttacattatttgtattttagaatagtccaacatacaaattttcagatataggttaatgtagaaaattatgaacaagtatttttatagacagagtaaaatttgaacagttttttagcatgtttgtaattgtagagtttcaatcagcattttaaaaaataacagactaaaaaacatcagagactacacacataagaaggtatgtaatcatgtaaaacttcttacggccattatcagtaatatttaaaagctatctttcagtattgtacttataggtacttctctttggtggcctcaagatgccaggatagaagttgaggtagtgggatgccccaatagctattgacccagaccagttaacagaagccaccacatgaggaaaatgagctctactctctcctacttttggattttatcccatgcagtggccaccagatagaataggtgaggcagtgtggattcacaaaagcattgagtttatatgtaccaaccagaactgcatttctaggagatatatagcaagactactgaagtaagtctgacttacagactcagtaaaataaaattttcatgtttttaactgaagacactctcgttatgagcgtatttgctcaaattcctcccagatactcccctgccccttccagggtcttttatttttatgatatttgcatgtatcttttttcgtaagaacacaagaatcaggtctcgattccaaggagtagagcctctgcagttcaatctgtgaccaaaggcctacaatgtcttgggctcacttcatatatgtgattacaggaatataaaagttatctttgttatgttgtctatttcttctagtgcatctctaaatttattgacttattttgtattaaatctgatacagttccttctcaaatatttaccttctgatcaatttgtagatttgttgttkttttccctcagtgtgctttctgagttatatagccacatggcttaatttttgaccaacaaaatttctttgcccattttctctttagggttggccacttcactgtgtttccatttccatacttgtaacaaacaaacttgtgggttgtgctttattatatgcattgtggtgttgagtacattatatatgaaatacaaaatttagtaagttccttatttaatgaatttttaaaattatttatggtacttctattttctccttcatttagcaggcaacacatagggaccaaattagatgttgctggtaatatgttaccagtaaatattttgagttgatggtgaatattattgtactgaaagaacaatgagggatagatgtgtggttccaagtctagtgttgggcaagttatataactattcagagtctggatttttatcattgttaaagagtggtctgctgaggtcaggagtttgaggtcaggagtttgagcctgaccaacatggtgaaacgctgtctactaaaaatacaaaattggccgggtatggtggtgcatgcctgtaatcctagctacttgggagggtgaggcaggagaatcgcttgaacctgggaggtggaagttgcactgagttgagatcacaccacctgcattccatcctgggcaacaagagcaaaaaaaaaaaaaaaaaacagtgttctgcattttgcatcttggtgttggtgtgatcaaatgagaataaaaaataatgaaagtgctttaaaatgttttaaaactgtagcacagaaatatacagctgctgggaagaataaataaactggaagttaaaatactcaaaaaaaagttcttgtatactgtttacactcattggcatcataagtcttctagagtagtaatttcctgttcattgaattgtgtctagtcaatttactatatataaagcaatgttaggtgtgtttggagtgtatagatgcttcctgagggtagagattcctgtattcctttgtcatggaatagattttttaccccaaagctgcactcatgtgggaagtattagtaataatcttagtatctgtttttatggaatccagtggttctgaatatttgttctagctccattataatttcctggggaactcttaaaatactttaaaatatgaatttccccaatctggaaaggccaaaatcatgagatctggacaggcacctggcartccaaattgtcctcataaactgcagacrgttttggtacatataggcagatttgaaacaaacactattccagacaggttttttgttttgttttgttttgtttttttaaaaaggaaagttgaaagttggcttagtgaaaagagcagtccttttttgaaattcttagtgcttgtggaatttctaccatgaagataggttatttttaaattagtatagttactcagcttctagagaaaagggcttggtaacatttgcctgatagcttccagtgttttttgttttttgttatttttttggatataagttttcaattcctttttcttatatagtaagtgcatggctttttagaaagggaagaaatgtattctgctcttcggctgttttgtgtctggtaatgtagtagatgccatttttgaaaagaatatatttaagcaatggtttggggttagatacattgcatttaactcgttagatagaatttatggagtaactacaaatactggagataatgtgttccacgctgaagaagggacaaattataacagaaggtcaagataaaatgagagactggtatttatttaaaatatttgacaaacgttgatagattggttcaagacatagttatacagctgtaatatgtttttcagttagatactaccattggtttttacaggctttttacatgacacatctgaaatctgagtcatagcttttatttctacagcattaacttgaggctctcatttttcctagttgcagactggtctagaaacaaatagacttatctttgaagataaggcaactccrtgtgttcccaatgcaagaagaattaaaaaaaagaagtcaaaaccaccagaaaaggtgtgaagacagaaccaaatcaggcaaaatgctgattacttggtatagtttatgtcaaaacacccataaactgtgtggtgtactacaaccttgagagagtaaatctttcattctcaatttcttcattcagaaggtggagataagtaatacctactcctaaatttttatcctgatagtgagaaaatatataagcattttggaactacagaacaccatacaaaattagcattattagtactgcattatcttgtgctcttacaatgttttgtgtatatgtatactgattttctacttagaatgtaactgttgttttgtcaagtgcttttttccccccagcctttcctaggctaggatatatgctaacaagtactattaggagctggcttgtgatcataatgccaactatagataaggcaagtagtagcctagtagttaactgaagtttcaagttagtcatgtatagtcagtttttattatcatgtgaataaaataaaattgttttccttttcttttcattcagaaaagttctaggaactattttggtgcacaaccacattatagattatgcttgggtgatatgccatttgtagctgggaaggtgagttggtcaaactccggattctttttatacaacattgatccctgaattaagtccctgcatctgcaagtatgtctacaaatggaaggaacatttttctgtgcctttaccagtgtgtggatcacagtgatgtgaaaatgagatgtagggaggtttttggggattagggaagcaaggaagagatggggaggataccttaaagtagataaagtatatgtggaaaggaagtgataaaacagagaccctaagttgaagaaggtgttgtttcagataggggtcaaggaaataagaaatagtatgtttgtagcattggatttttagtatcaatcctgttgagttacatttagatataggtagatattcgaataagcacgtagcacattctgcttgtcctcacatccagatcatttctaggactaattctccaagaagcagtcatacrtacacttgaatcttcagtttcttcagcacttgaatgtaaagctgtattgtcatatatcaagtactgagtgaagtrcctaaaactgtgctagttgacactactttataagctgtttgtgttgctggtggttttatatttagattccaactagattgttattctggcatcttgggaagtaaatgttcttctgaattttgtatttgtttatatttatttattttaaacccctagtaaattcgcagtgaaatcatggggaatataataaattagtggtgacaagcatttgaaaaaggtacagttgacccttgaacaacatgagtccgaactctgtgtgggtctacttacaggcagattttttttttcaataagtatcttggaaaattttttggagatttttggcaatttgaaaaaacttgcaaactatagcttagaaatatcagaagttaagaaaaagttggtatgtcatagatgcataaaattgactatgtcaatactagtgcattttatcatttaytaccataaaatatacacaagttttttttaattataatttatcaaaacaatttgcacacagactacgtgacgccattcacagtccagagaaatgtaaacagagataaagatgcagtatgaaatcataactgtataaaattaactgtagtacatactgtacgactgataatttkgtagccaccttctgttgccattgtgatgagctcaagggttgggagtattcacttaaaatgccacgtgacgctaatcatcttcaaatgagcagttcatctctccagtcaattgtgtatcacagtaaaaagtgttctctagcagttccatattttccatcatgtttagcacaatacagtaaataatttgaataatatcatgggacccatatcaagtgctactaatgatggtggaagtgctcccaagaagcagacaaaagtcatgacatgacaagaaaaagttgcattgcttgatatgtaccatagattgaggtctgcagctgcggttgtccaccatttcaaaataaatgaatccagctgaaggcctattgtaaaaaaaaaaaaaaaaaaaaaatgatcccggcatgttggcgtgcacctgtggtcccagctactcaggaggctgacagaagaggatcactgtagcccaggagttcgagactgtagtaagcgatgatggcaccactgtactccagcataggcaacagagtaagatcctctttaaaaaattttttttwwaaaaaaaaggaaattgtgaatctgtcactgcagctactctagcaggtgccaaaaccttgtgctttttgcaaaatagctttttatctcattgaaaatgcagcttttatgtggatgcaggattgctataagaaaggcatacttgtagactctaatatgatttgagaaaaaggaaagtcattatatgacaacttaaaaggaaggtgaggtatctaaagctggagaatttaattccagcaaaggatggcttgataattttagaggtttggctttaaaaatgtcaagataggagaagcagcttctgctgaccaagaggcagcagatgaatcccaagataccattaagaaaatcattgaggagaaagggtatcttcctgaacaggcttttaatgcagacagaagtaccctattctggaaaaacatgatgccacgaaggatatttataagtaaggaggacaagtcagcaccaggatttaaggaaagaggagacgggctaaatctactattttgtgaaaacacaatccgatttacaatcaggactgcccttatctataaagctgctaatccctgagccttcaaggggaaatatacccaactgccagtctttgggtttacaacaagaatgaccctttgagaaccctttttctaaactggatttagaaaaaacattgatccatcaatcctttgtccctgaagtcaggaagtaatttgccagtaagagactgccttttaaagtctttttaatactaggcattgcccctagctacccaggagcatggaagttcaacaccaaaggcatggaagtagtctacttgtccctaaacacagtgtgtctaattcaccctctggatcagggagcataaggacttctaaggcacattacatacactataaaaagggttcttaatgctgtggaagagaacttcagagagaacattatgagggtctggaaggattacagttgaagatgatgccatcatttttatagaaaaagtcatgaaagccatcaagtctgaaataataaattcctgttggagaaaactctccaggtgatatgcatgatttcacaggatttatgacaaagccaatcatgaaaaagatggtagatatggcaaaaaaggttggaggtgaaggatttcaagatacgaattttggagaaattaaagagtcagtagacaccatgatagaggaattaacrgaagatgactgggatggataagagtgctttcaaaccagtgccacaagatgaagaagacaacacagaagtaatgtcagaaaacaagttgacattagataatctgacagaagggttctaattattcaagactgcttttgactttttttttttttttttttttgagacggagtctcgctctgtcactcaggctggagtgcagtggcacgatctcagctcactgcaacctctgcctcctgggttcaagcaattctcccacctcagcctcccaagtacctggacaacaggcacgcgccaccatgcctggctaatttttgtatttttttagtaaagacagggtttctccatgttggccaggctggtctcgaaatcctgaccttaggtgatccacctgcctcagcctcccaaagtgctgggattctgtaatcccactgtaatcccagtggctgagccactgcgcccagcctgcttttgacttttacgacatcgacccttctatgatacatcactgaaactaaaacaaatggtggaagaattggtatctcatagaaacatttttagagaaatgaaaaagcagaaaagtcaagacaaattatagtgtatttctgtaaagttacacagaatgtgctagcctctcctgcctccccctccacttcttctgcctctgccactcctgagacagcaagaccaaccctacccttctgcctactcaacagtgaagataatggggatgaaggcctgtatggtgatccagttaatgaatagtaaatatactttctcttccttaggattttcttaatatttttttctaactttacttttagaatattgcttacaatacataaaacaaaaatgcttccagtcaacagcaggctattacattttagggcaaaatttattayagttctcagttacataagtgggagctgaatgatcagaacccatggacacatagtggggaacaacatacactggagcctgtttggtgggggagttggtcaacggggagggagagcatcaggaagagtacctaatggatgctggggttaatacctaggtgatgggttgatctgtgcagcaaaccaccatgacacacatttacctatataacaaacctgcgcatgtacgccagaacttaaaagttgaaggaaaaaaaaatttcattatggcagagttttgactacatgggtggtcggtgcccctaacccctccattgttcaagggtcaagtgcatattaatataatcagaaaaataacagaacgagaattttttaaattattgcatattgaaagtgtactcataggcaattagtatgctaaatatatattacaagttacgagcaaaatagtggttacatcgattgatttttgaatagtggaccagccttgcattgatgtaataaactcccacttggatgtgatatataatactgctgcattcactttgctagctaacaatagaaactaagattagaaggaaagcatatgtttagcttagcatggtggttccaaatctggctaatcaaaatcaactggaggacttgaaaacacaaatttccaaaccctaactctgcagtgagtttggtgtgctgcctaggaacctgcattttaaatatgctttctaataatatttatggagccaagtaagcccagccatctatttataaagtggaatagtacattgagattgttggtttagtgtttaaaacaaaagcaaaatatctttgagaagtctatcaggtttttcttacacacrtgatagacatgtaatttagtgcttcctattattccaggatacagaaatgaacaatagtgtctaccacctggatgtacactgtttaataggtgaaatagataygtaaaagcaattaaaatatgataaatgctatgagagagatgtaaaaagtgttataggtgatctgakaatggactgattgattacctggcagttttaaggaagcctttaaaaataatatatttgaactgggttttaaagaatgatataaatgttgctaatacaccaaaaaaatgtcatctgcaaatatggtttgttcacaaaatggagagaaggggaggatgrtaggacatgaggctaggaaatgtaggttgcagctcaatgatgtgtatgtagggccttattttccattctgaaacatagttagtggatttatatcaaaggatttcaaatagaagaacatcatgatgagaataattttaggatttatatactctactttrgggggtggagagttctttttacctaggcttagggaatagaaagtggtgtagagaatataacttcaattacttctttcatcatttttcttcctttagtccacaagccctagccatgccgtggtagccaatgttcagcttgtcttgcatctaatgaagcaacacagtaaagctttgtgcaatgatcgagtcrtcaacagtattcctttggcaaagcaagtatcttcacgaggtggtaaaagtaagaagytgtcagtaacacctccctcctccaacggtattaatgaggagttgtcagaagtcttacagactttacaggatgaatttgggcaaatgagcttgtgagtttttgtttttttttttaaattcagtttagctctaaaacctcattttttaaaaacttgttgactttattaaatcttactttcctttgttgagcaagtatggttgagcacaatccttataccaaccaagttactgggactttaacaaatacaactaataagggtaaaatctctctctttttaaatactgttaaatgttttgaagaccaaggtttatatttaagttttatttctttgagaacttatgatatacagtcatgcatcactgaatgacaaagatgtgctctgagaaakacatcattaggcgattttcttttccttgtgctaacataagagtgtgctaagcttatagcttattgctcctaggctacaaacctatacagcatgttactctactactaaatactatatgcagttgtaacacaatggtaagtatttgtgtatataaacawctaggtagagtaaaaatatgatactaaagtcttacrggaccactgttgtatatgtggtctgttgtttactacatcatcatctggcacctgacatyacattcattttagctaaacttaactgataagacatgagtgtttgaagagcaagattcatctgtagactttacatatacaatactcttttggggaaaataagaatataaagaattaaccttgaaattaagaaytcttgcatttccctctagtgcctttcttgaacttttaaattcatatttttaattaaaaatttcttgatctaggctaggcatggtggctcacacctgtaatcccagcactttgggaggctgaagtgggcatatcacatcctggctaacagggtgaaaacctgtctgtactaaaaatacaaaaaattggccaggcatggtggcaggcgcctgtagtcccagctactcgggaggctgaggcaggagaatggcgtgaacccgggaggcagagcttgctgtgagccgagatcatgtcactgcactccagcctgggcgacagagcaagactccgtctcaaaaaaaaaaaaaaaatttattgctctgttcaaaaaatggagtcattttttaaacacatggagcagtaacccataatgaggtataatagacctaaccatgaaacacagaaaacttaaccatrttctacttctgctttgtatatagtgatcaccagcagcttgcaaaacttatccaggagtcgccaaccgttgaactgaaagacaagttggagtgtgaattggaggcattagtgggaaggatggaagcaaaagccaaccaaataactaaagttcgaaaataccaagcccaggtaactcagttttccttcactcaagtttctaatgattaagaaaaaaaaaacactttaattcaaatattaaatgatgacactaagtgtatcatagataaatatctacaggagatacttctttactgaagacatttgttcattgagaatkggtaagtggattaagaaagaagacacttttagtcacttagcatattcatctaagaaacatctttcaaatactgaatatatttaatattctttatgaataagctttaacttctttgatgaatttaaatyggagtttatccaagtaagtttttttaaaagcacctgcgaaattctgtttccaaaggaataagtcatacattaaatatgtgaaatatatttatgttgstaatcattttatatcagccaacaatgtagtactaccagatgcagtggtgacatcacactcaagggttttcaaccagagagaaacatgattcatatatttaagagattactgtagtgactaggggtagggtaatgggatcaaggcagagaggctgagagatcagctatagatgtatcagaggtggtcagcaagacagtagttgggtttgggcagaggtaaacagatttgaggtatgttttggaagtaaaaaaaatattggggttacttgctgctgggtatcatgtagaaggagagggagttaggatggtgattccactgactaaaatggagaaagctgagaagttcagagagcagaacagktttgttgactgttgattggtagccatatgatagacacacagtgccaagtgctctgagtatatcttctcatttaattttcacaaaaggcttctgaggtgggtatattctcatattatagatgaggtagatgctaagccacattttctgggaagtatgcatatatcctcagtgaaattaaataacttgcccaagtaccagcttactgggaaatggcagagctgggatgaaactagccttttcaactctaaaacttyggctgttttttcaaagttcatgtatgaaaaagaaatacaagcaaattattcctgtaggagtaaggagtaatggtctaatttgttgcttatactaattagacttattctattggaacaccaacatgccagcatcagtttggctaaagtaaaaataaagctcccgtatttaaaattattctaaaaataatggaacaaaaataaaattcttttcatagtattaatacattaccaattacatctgttcatccatctggaaattgcttctttgcctcctcagactagtttctagaatrtctttctcctcttctcccatttgtgaaaatccttcccattcttcttttctctgtgtctgattttttgcctccttcatgagtctttccttcaactccccttgtttctcactcgccctgttctgtactttggcaatattgccttaatttaggacaaccagaatttgtttactcatgtctacttgtttgtgtattgttttatatatatataagcatatatttatttatattaatatttaagtgttaaatgactagtgcagtagattttgaagtctttaaaagaaagcctagaatgtattatttgagtttcagttagcatgagagttaaccaaaaaaaggtactcttgtactttttgttgtcagaaaaaaaatattttcattaaattctccttttccttcctgccttggttatttggtatagctggagaaacagaagttagagaagcagaagaaggaattaaaagctaccaaaaagactcttgatgaagaargaaacagcagcagccgttctggaatcacagggaccacaaataagaaagattttatgaaactgagacctggagaaaaaaggagaaaaaatcttcagttattgaaggacatgcaaagcatacagaattcattacaaagcagtagtttgtgttgggattactgactcataaccaggtcagaaattttattcagataatctgtacctcatcaatcagatgatgacaatttacttcccaggtctcatactcacttatgttggaattaattaatagcaggtgttaaaggacccaggcttcattacacaggcttttcatgtatgcaggatgactcaatgttaaagcatttaaatggaaaccaggggagttttaaagcccgagaaaccacacataatcttttgttgagatgagtttgctgtactgacgctgcactttgtaaacagattaccagttttttacttgtgggtgtgattttttaaaatagttctttatatataattaaaattaggtttaaattttcaaaatatgagactatgctataggcagtgcttgcttgaaaagtctcatttttaaatctccctggcatgaggtgcccacttcccctttccaaagcaaccattaaacatactttgtttctactattggtggagtttttctatatttwaaaatacatatatatttcagaggatttttattttgctttttggcatttcagactttgatcagtgttaagtgcacttgtattgctttttaatctgttaattttttaaagacccaagcagtcattttgagttatatctataaaaattataaaaggatttttgaaagtataaacaaattgtcagtgaaataaatgagattttggaataaagtgagaatgggagaagggatatgttgtgagcatataccttcacagttcttaatacctgttttgtaatcatgatattcagtcaaggcattatggtttttaatcttgaaacttagagaaccctttgaatatttgcttttactggtgtacagtatgagtggaatatraactgtacacataattatcatgttgatataaatcataatttcaactagatcaagacatgttaaccttttataaatttaaagtcaataaagcacctttttaaaggaaacactgcaactttccttaacagcctgttaataaaggctttgtgacaagctctcaaaaaatgcatttctaaataggaggacatcaatgtattgatgaagagaaaaaactagtacttagttgccacactcatgcttacatagaaagagagcccaagaatattagatttcctcatgatacaagatactacagtaacaggctttaatttaggatccttaagattttggggtattatttgtgactctcctgaaattgtaaacttgtgcttctgtgtccagttttctaatgagtaggttcgtagcttgattgaattaataattgtgagcccatagacacaagggaagtgagaaacagtgctctggtgacatgataaatatatgtgtcaaccaccatttcarctattraaaactcctgttatctccttgtttgaatttcaggtcattaaattgtataaccatcatttgaattgtagtggctctgagtcctaattaggagaatggtgattgaatgatgctaaatcccaccccttttctcagctaggattcaaactgaactactccagctttttgtactgtcaggtgagaagtgaaaaaatactgcttccattttcttatctgcaagtttacagtagaggaatgtgtcatccatccacttacgttgtaacagagctttattgcaattcatttcaaataaggttatgtttacagacttgtggtagacatgtgaattgttcattccaatataatgtgaattgcagtggtagtagcggtatacacagtgctatgggggcacagaggaaggtggggatgtcagagaaggcagtcgtgaatcagataacttcccaaaggaagagatgatgcctaaactctagaaaataggaattagtcacaagggagaacagttgttccaggtgcacaagacagactgaaccaaagtggggaggcaggaatctgcagattacatgaggcaattgtgaacagcagagtagcattggtacgtaaaagttgaggtatgcagagactaggtcgaaggaggctaaggagcttcaacttaatcatactggtctctaaattttgtaaccctaatcaaaaagggaaaaaattacacctgcacaaccaatagacatacaaagttatgaaacatgtaactgtcaattcaaatatttaaaagttttgcttgtgtaaatatataaaaagggctagtattcctcctccctccctcccacacacaccagtggtatatattaaatgcccaagtgcatgtactccatattggagacttctgcagaaggtgaggggaaccactggaaggttctcagcagagaagtggtagggttgcacttagatttccctggcttttgatttgaatttgaagtggatgcaagtatgttaagactagaagctttaaattcttgatctcttcagccattctacattcttttatgtggtatcaggccaagataaccaaggtttaaatgaggaaaatggcagatgcatttgtgaaatacttggagtagaaagcttaatttttaattactgatttgctagccacttaaatgccctgttaaaaagcttatatttcacacaattaccaaagaaatcattttggtaccaattttgctaaattggatatactaatagaaacttcctcactgcaagaccaagagggaggctaaggttcagactctctgtatagtgaattagtgagtggaaaaacactgtatattttaattgtttgatttgggtgttggttaaggaaaaatgggtacaaactgaacattttcatctggggtgcatattcctccaataatttccaaatatttctggggaaaaaaaagaaatggcaactttggacaagaacaaagtttaaaagtcagttggaatttcttttaattaaaagaccaaggggacaagaagctcctttgttacagtacattacatatggctcttatgtagaataaaatagacatcagagtcaaatgtttctaccagcaccaaactcttacttgtagcaggtgaacagtgaagcaagatttcttttactggctttgagattgtaatacatcttttacatgcagtgtgttctttggtagacttaatcgttgagtgaaattacagaatttgcaaaggaaaaaaatgtaaaatttgagcacagtacttctcactataagctatttatacagaattcagaaaaaatgtcaatcctagtaagatttttaaatacttcttaaaaacttgctaattagcttctgtgtgttcagacacacaagacaagtgaaatacactgtagtaaataattagtttttaaaatatctttcatgatgtttctggtaattgggctaatctgaagggcatggaattctttgaactcctgtatggctactttctccccttcattttcccccaagcacatctataaggcctcccattttggatcaacttgctaatatgtcttaagtatgtaaataatgacggcaataattttcaactactaccacaccgtagtatcttcaacactttgccttttactatatgaagaatatggaagttgaaaagtgatcaaggtaaatcagttactgaaaaaaagaaaaacctagaatggagaaagggatatcaaatgattttgatctgtcatgacatcaaggcccaatatatgtgatgccacagaatttcagtgttggtttgaaaactgatgttcctctgcacagtgagcacagagtgtatttctaaaatggttttaatattaccagatgccaaaaatttgtaacagcatttgccttttaatagaaacttgttcccactgtgaatccaggattgaagtattttaatattctttggatacttaaaagattagtatcataatcatgtaattacatatggagttacttcacttaagccacctgcactgctacagttctaaactcatcctagagagatttaaaataaataaagtgactgaactttctctcatagatgggttctaaattccgaagactttctactcatagagctgccagtgtaatcaagagtgtatagcaatgatgcccctgatcttacagtcctttatacaacagtttggacaggagtgacacactgtgcaggagagctggctctctctgaggatgaggttgatcggttagaaatctctctctgtagttcctctacttttttctgaagctctgctcgtttagcaagaagttctttgtatctgttgtgaataggttcctgcaagagcaaaacataaaatattcaactaggcaatcctgaccaaagccaggtcaaatcattccctaaatgttgcagtgtatgttttttcagctgttggaaccaatggcacctttccaacccatcagtgaaattaaataccgggactgtggacaccactaatcttttcactggctttcccagtgcccctgagtatttccaaagaataacctgctgtgtaggtgctcctgaaactggtacttttccaaatacaacaaataattaacaagacaattaaaagacagtagtcagaagattccctgttatttataggtttttagtcttaaacagttctaagtagttaatattccataaacatattcacagtagaccagaattttgttcagcttttaactttcctaaagctactttcttcagcttattaaaacaagaccccctagaggttatccagacagaggagggaagatgcaagaaaagagagcagtgatttgtccaatgtcatacaagcagtcctaagaaccaggtatactgattaccctgccccagtgtagtatttttctactatacaattgttaactatcaatgggtaaggagtaaagttttaaatatgcacagataatctttccagctgcttttaaggagacaaagttgcactgcatgaatgaaaactcccattgtatattgtaaggcacatacctgtggtttcatccgtggattccaccttatgtaatatcccacccagagctctaggtggcgcatgctggctactggataaaggacatgattggaatagctcccatagagaggattagtgaagtcttccagctggctgtttatgtaagaccacagtgacacagtccttttaggaagattctgtaggcaggaaaaataggtaaagattctccaccacataagccatttacactttagatgaaatttgtgaagaagtactttgttgtcattaaaatctctttagaggaagtggacttggagacttcagtgataaaccaacttatattaagatcagagggtactggaaaacagtatgcagttcctcaaagagataccatatgacccaacaattccactcttgtacatatccagcaaacagaagacatgtctgtacaaaaacttttttatagatgttcaaagcagcattattcattaacagccaagaagtgggaacaacctaaaagtccatcaactgacgaatggataagtaaaatatatccacacaatggaatattattcagccataaaaagaaatgatataaaatgtatgaaccttgaaagcatattaaaggaaaggagctagacacaaggtttacatattaaatgattccatttatatgaaatgtccagaagaggcaaatctagagacaaaaacattagtgtttggcaggggtgaatggggagtgactattaacaggttttctgaggtgatgaaatgttctgaaatgaaaatgtgatggctgtacaactcagatatactaaaaaccagtcaactatacactatcaaagtgaatttcatggtatgcatattattatcaatttaaaaagtttttttaaaaataatcaatgattcctaccccaaggctctcaaaaaataaaactcttcgaaacttagctatgctatttctaatgaacattccttaagttgttgagtgcctgctatgcatagaaatacttactgcatgctagacactgaagacataaggtgaatttaaaaatttaatacctgcctttaaggaagtctaggaaatactacatagcagttcttgtggtattttgtattgcttatttaataatcttcataattttacaaaagcagacattaacttccccaagcgaactgttacagtaagtgatagatccaggatttgaacccagcaactgggcttcagtgcaagtacttattcctactgtgctttataaaataaaacataaatactttgtaaccacattttttagaataaaagttgatgcagagggagataccaatcaagatgattaagatgttgatacataggatagacaagttttgataaagaagtaaaacttgaaatgtaatccttacaccatttcttcttaataccaaccccacttaacagtgatacctttggggaaaagggataacgaaaaactttaactttctacatactatcttttccgtatttgaatttttttatggtattactttacaacttaaaaaactcaaaaacttaacctaaaatgtctcaataagtaggatatacttgggaatttgagctgcctattcactcgaatatacattttctgctaattaaatttttctgcacctgctgtaaaggatttccattctacatggaaaaattggtacactggtgctccttagatttcacgtacttcagttctctttagcagaaaccacttcccactcatgaactcagcagacagctagctagcaccttcagccttgtgacaaagatacttcagaatatatcaggtccagatatatggaaggaagccctcaatattatagcatgtaagataaagtatgacccaaaagaatgacttcagttgaaatctgtcacagagtacattcttttagggaaaagtatacagtagagatagtatggggaaggtcatgtttcatattttacctcttttcctctctgttgttcactattacagaggaatgttccgaataagcagctgtataggtggtccaaaatggtaatgagaaaatactcattgaattcaaatgcggtaggaaactgcaaatcaaacatcacaaacacataaattaagacattcttcaagcatattcatccctgtcatgggtagatccttttgaggtagtatttaaaatgaagttaaacattcaaatctacattattccaagccattatggcattattcgtatggttttcttttcaaaaatcatgttatcacttttctgatcatgatgtttctgtatctgctatatctgctaaccctaaatttgcaggctgaattttgacttaggcaattctggcaactctaggcattctctgcccaaaatgaccacaaacaacattaagattctttaaattttcaagaacatagttgtttttcttttttaaggattacacacaaaatgccaataatgtctccagaaaatgtcagcaatacacaaaagtaaacatctaaggcagataatttacaagtcaaccaacctattaaatatttagatggtgcaaaaataattgcggcttttgccat

SEQ ID NO: 97670 - DNA, 28265 bp, Homo sapiens
tatatgtgtgtgtatatatatggatatatacacatatatatatgcaggcagtggcaggctgccaggtctggggaaggagcatgggtttcagaagccccagttcctgcccactgcccacacactggctgtggaagctctgggggtaaggtgttcccttggcctgtctggctttcagctggattctcatttggcctctcatccagggctgcagccaagatctctgatggctcccagtactatgttctgctcatcatcactgatggggtcatctctgacatgacgcagaccaaggaggccatcgtcagcgtgagtctgaggaggagggcttggcagggaggagtaatgtcaatactgtgaaggggctgagattttatcctacttgcaagctaacaagttagcctgccagtttcatggatgctggcagaagacacaagactcttggattagagatagaggactttgatttccagcaaaagcagtagctggagtattagcatttgcttgaattctctaagtcccagttcccactggatgatgtgaagagggacagatgatgcttgcagccactgtgggttgcgttacagaagaggaaccctgagcttagggaacttgagtcttttataatggacagtaagcatgcttgccttttgttccaaaggtctccagggagacctttttttaaaactatattggacagtatgcaaatatgccctctgctctagaggaaaatactatatctttcaaggctgcttgatatagaaacatccttgaaaaagtagtctggggcagagaaaatcaaggtgcctctgcttacaagatgtgcagaaccatgacacacatacacagagaactgtctcccaacagtcacctccctagtgatgcctgcttgccccaacagttcaccctctttcccctacaggcctcctcattgcccatgtctatcattatcgtcggtgtaggaccagccatgtttgagggtgagtaggaaggggtgtccctgagtgggactaagaactaaggagaaaagtgggagggggtcgggtacttgggcctgcctcacagatgacacaaggtagacacccccgtgtgaagccttggtcaagtcacagaccttctctgaacctgtttccttatcagaaccaaggctgatgatactaatacttccctctggggttcctgggaggatggactgcctgggaggcataataatagtaataataactccataacgaagactgatatttgtaggacttgatcacaagcattaggcattctcctgatgactccaaaggggagctcaaagggagggggcagcatggggtggggctggagaggccaatcagctgaggggtgtgtcttttctgcagcaatggaagagttggacggtgatgatgtgcgcgtgtcctctaggggacgctacgcagagcgggacatcgttcaggtagacctgacgtgggagaggctgtggagctgagaggcacagtgagaagaggctaagttgggagccactttcacttactgccttctcagtctcctacttttttcccccgtcactctttcatcctttctcattcattgaatacatcctttttgacaaacaggaaggttgctgcagccttggcacatccgtggtgtaggtcgggaggtccccaaggcccctgccctctagtggagacaaccaacaataaataatcacacaaagaaatatctcattagattgtgataagtactccagaggaatagcaaatgccactgtgagagcctgtaacagggacctaacataggtacagtagtcaggaaagggttctttagcttgccaagacctaagggaggggataagcattacagggagaggagcagcatgtgagaaggctctgaggcccagaagaactggcccgatccacgaaaaagcagaagctagggtagcaggatcacactgagtgtgaggagggaggcaaaatttgggggtatgttagaattggaaagctcttgaaggattttacatagaggagtgagatggcattttaaaaggatctctctagctgctgcatggtgggtggacagtaacagggcaagagaaaaggcaggtagactcattagtgaggaagcctttgaagtagtagaggggaggcgataaagatctggctagaagcagtggggagggagagaaagtggcaggttcaaaagatatttaagaagaaaattttacaagacttgatgattagatgatgacagggagtgaggagggcttcaaggatgactcagtattctagcttaagcaactgggtgagtgacatcccatttgctgggaaggggaaagctagaggaggagatttggcagaaagagctagaattcagttgtgaacacactgggttcgaagtatctgtgacaattgaatggagtggtaatatgggcaactaaatatgtggttctagaccttaaaaagaggtcagggatgggcccaagcatggcggctcatgcctataatcccaacactttggtaggccaaggcaggagggcctcttgagaccaggagtttgagaccagcctggacaacatagcaagacctgatctctgctacattaaaaaaataaaggccgggcgcggtggctcacgcttgtaatcccagcactttgggaggctgaggcgggcggattgcctgaggtcaggagttcgaaaccagcctgaccaacatggagaaaccccgtctctactaaaaatataaaattagccgggtgtggtggtgcatgtctgtaatcccagctacttgggaggctgaggcaggagaatcacttgaacccgggaggcagagattgcagtgagccgagatcgcaccattgctctccagcctgggcaacaagagtgaaactctgtctcaaaagaaaaaaataaaataaataaaaataaaacataattttttgaaaagaggtcatggatggatatatacatttggcagtcattagaaacagattttcttttgttttttttctcccttatcagcccctctccccccacatctcatttcttctcctctccctaagtccctctcctaggcctctctctcttcccagccccttctcacagactcctcctccttcttgccccagctccatctctctgacctcctcctgttctcaggatcccttctctctggtccctgccccttgtctcccctgctccctcctttccagtctccctccccacctcctggcctgctctacttccttccagggaacaatttttaaagtcatggaagtgtatgaaatcatccaggaagagagctgagagagagaagggaccaggtttagagagcagatagacccagaggaatggtggtgggaggggggagcttcaagaaaggtaagcaagaagccagaagagtgtggtatcaagagtgggacgtgtccagaagaattatggtcaaatgtaatggaaagctaaagagaagtcaagcaagatgaggactaaaaattactgttcactggactgatttagcaacacagggccactgacgacatcagcaaaagcagtttcaatggcctgtgtgaagccaaactggagtgggttgagggtgaataaaaggtggaaaaaaaagtgggtggagagaaagcaaatgtagaaaactgttcaagatgtggagagggagatactgtgatagttggaaagagatgctggggatcaaaaaagaagcctccctgctgcacccccatgccctctctcctggtcatggcttatctcttcttgtctgtgcctgacccagttcgtcccattccgagactatgttgaccggtcggggaaccaggtgttgagcatggcccgactggccaaggatgtgctggccgagatcccggagcagctgctgtcctatatgcgcaccagagacatccagcctcggcccccaccccctgccaaccccagcccgatcccagctccagagcagccctgaggattccacatatccaatgcctcacagtctgcaagcctgctcacccactgcttctgctttaagccagaggcacctggaaccctggacttcactgggagggccaacttggaggatcagtgctggctgacaagccctccgcctccttgcctgcagagggcctggcactatcaccacctctctgccttcatgccaataataaagctgatctttattccacctctgtctcatgcatgttggcgaaggaagactatgggacccaacgactggggccacatcaagagggagggaaccaggatggcttcagttagattcatccccatcctaacacgttcatccaatcacttcttcatacattcttcaaagaccttaataagtgaaactttgtatgtttttcctcaggagagaggcccatagttgttttttttcttttttccataaaatccgaatcctacacacgacccatagttctcagcagattctcaaacgaattcctgaccactaaaggagataacttagtataactctgctttgatccatctattctgaattattttaataaggataataacagctaatattttctttgaacattcactacatgtcaaaccgtgtgctaggtgatttacaagcatcatctcatttaattctcacaacaactctgagaacaggtactatatattattcccactttacacataaggaaactgaggctctgagaagatgagtcatttaagataattcatcagtttgacttcagatcccaagatcttaatcagcaaacctcttcctggcatgtcgattttattgggatggtttttagaaaacatacattttattgggtcaaatgcaaagtttgcattaagaagatagaagctttcagatgctttgggctttgtcccagaaccctggaagacctttcacgctcctctttgatgacaaaactggagaagtattgtttaaggatgtctccccctgccatgcaagttctctgaaaccctcaagaactaacaacagagttttcgagctctgttttacaaataaggaacttaaagaactgaacttgcccacgttcacattgctaggaggtgacccactcacattaaatcagctgttttggcaccatgttccaatcagcaacccgcagcacatccctgccaacccacagatttcccaccgctttaccagacaagccctttcacacccaccggccccaaaccagccccttctctcagacccataccttttctctagcacctctcctttacttttcccaagtttcttccctttccttcagtcacgccccgttatccctaatcggtcctgccctttccccacagctccgcccctgccttaccaagccccgcctgctcccttcagcgtcgcatcgctttttccaactttgttctttatttctagtccagctccactttccaggctcatccaaagctccgccctttctctcccgagtactcttcttctgtttagccccactttttaccccgctattctaacaggcccccgctgtgcggtagccccgccccctcccacaagccccgccccacagaccggtctagtctccagccccgccccggtcctacccataactaccggtcccttaggctccagcccgcatccctcttgctcccggccctgcccccagccccgccccgtgactctggccccgcctcaccgccttcctccgagaccaaggccaggtccctcccgcagccgcggcgccagcaggaggcagggagcggatagggaggaggcagagggggaggggagaagggcgggctcctcacgcccagccccgcgctcaccgtccgtggttgcagattcgccacaaaccgcccgacgaccccagatcccgagtacggtgacttcagtctccagaaactccactctaagatgggagagctagagaagccctgtggggtgtccagggtcctttctgaatcccggagcacggtctttcgagcctcagcgggcgggcggggatccgtggcgaaagtgcagctcagtagcgccgcggcgccacgtttaccctgcgcagacgccgtcgccgccgctgctgccgccgccgctgccacagcctttgccgccacggtctccgccgccgctgtcctcgcgctgcctctgggagcctccattgttccagcagcgcccggtcccgagaccgggcatcttgggggctcgcgaaacgggcggcggccgacggagttgagaccccagggcgccggcgggaccaggagcggcaggggtcagctcaggaatcccggggagccgggaccaaagcgtggggcggcagggggccggggtggcgaggtctacggtctccggagttggggstcccccttcccggcccgactttccccgccgacctccccaagtggggtcggagccccggcgggcgcccccggcgatgagcccggactcgaggtggccggtgagtgcgggcctgggaccagggcgggagtggccggcagggaaggggtaggctacgttcgtgggacgcgcactgagccgcgtggcccgggaacctctctggcaactccagttgggagaactgacagtgcattgcttcccagcaggcatcctggggcaacagtgtatctttcggggctgcccgggctagtggcaggcggggagccttgtttcacttgttacacttccacaaaggggaaacgccgccgcatccggagagtgggctgcgggcactgccggggcccagccctatccctccggcccccgccccttacttcctccagccccctgagcttcaggggcagatgcagccgccattctccttgggccctccccacgggctttctggtctaagttctcgtctccctcgcctgtgcctctgctgccgggttccaaggggagattgctgattcgctgtgctactttgggaaccattcacccgggacccagcttggaaagaggagagcttgtttgtgcttcggttggtttatgtttaaagacacagccgcaggtaggaaatagaagagttgcagttggacgtgtagcgttactgatgtgaaaatcaggagccgttgacagtggagctggagcagcccacttgcctggttaaggcacaggtggagaggccaagaggggttattttgtcagggagctcatgatagccctgcctggctgggatggtgccaagcccctagctgaatggttgaactcaactaggccgagagaaattggggcagtctctgaccaagctgggcttcctgaggcctggtgccatctgctgtctacactcacccaggaatgttggggagcggggagggagggcccctgcggaccagcatggagctgagcatgcctagattgtcgcgttcgtgtttgtacccttagggcctggcacttggtagtcactcagttgatgtgtgagtgggtgaacagctcaaatgtaatacaagctgctgtcactgactaaatgacctcagttttcactttgtttcacagtacatctcctacccagtaccagggccaggctccccataaagacctcaaaagtaaatgaattctttctgtgatccagtgatttctgcaggagtccaacgctaaagcattagccacccacccattcagctttctacatggccttcatcccatctgagctctcagtctggtgatcccctcattcagctattcgttcaacaggtcattcattcgttcgccaaaaactgaatgtccagtgcatgctaggtactggggatrcagaggtggataggctctggtacccttgctacacagctcccagtccagrggggagacaactttcagtatgtcaagtgctgtggtagaggtgagaatggaatgctgtggaaacagctccccatgggagagtcagagaagttgtgtcagaagtgacatttgagctggttttttgaagaatgagtaggagcccaccaatcagaaagtatggagggcattccaaatagggatcattttgcaggaatgagaggttataacattcagggaatggcaagatcccctgtgtagacaaaaacagctgtaacttgtaaaaagaaaggaggactagggccagtcagtgaaaggagctctttgaatggcatcatagagaatttggaatattatcttgaaggaactgggagcatcaggaggcttttaatgaagagagtgtcatgatcattactacctggtagaaagatcattctcctacatgatgtgagattgggctaaagaagttgagacatagggcaggataaccaggcaagaggtgatgagggcccagatatgggctatggtggaggagatggcatttggagacactgtagaggtaggctggccagaatctggtgactccaagtgaggrggagggctagaaagactggggtctctggtgcaaatggccaggaactcatccccagccttatgttaactgatctgtgtattctagatgtgacagcatgggggtggactttgatgtgaagactttctgccacaacttgcgggcgactaagccaccatacgagtgcccggtggagacctgccgaaaggtctacaagagttacagtggtattgagtaccacctgtaccactatgaccacgacaacccaccacccccacaacaaactccactccgcaagcacaagaaaaaggggcgccagtcacgcccagccaacaagcagtcacccagcccctcagaggtctcacagtcaccaggccgtgaggtgatgagctatgcacaggcccagcgcatggtggaggtggacttgcatggccgcgtccaccgcatcagcatctttgacaacctggatgtggtgtcagaggatgaggaagcccccgaggaggcccctgagaatggcagcaacaaggagaacactgagacaccagctgctactcccaagtcaggcaaacataagaacaaggagaagcgcaaggactccaaccatcaccaccaccacaatgtttctgcgagcaccactcccaagctgccagaggtggtctatcgggagctggaacaggacacccctgatgccccaccccggccaacttcctattaccggtaaggccacctctaccttgcagctctggaaaactggtcaagcagggctcactagccagagagaggtgagaggcacagatagaagagtgacaggaataaagaatagtgaaagaacactgattttgccagggcagtgagtggaatggtacgccactaatgcacttactctacagtgccacacgctactcctttattttattctcaaaactctcaggtaggtatttttctcatttcacagatgaggaaactatggtcaagaaagggtgccagatttatcctttttttttttttttttttttttgagacagggcctggctctgtcaccctgcctggagtgcagttggctcaccccaacttcctccttccgtgcttaagtgatcctcccactcagcctcctgagtagctgcaactacaggcacatgccaccatgcccagctagtttttwaaattttttgtagagatggggtttcaccatgttgcctaggctagtcttgaattcctggactcaagtgatccacccacctcagcctcccaaagtgctgggattacaggcgtgagccactgtgcctggccagacttatctgaaatcacatgccagtagatagctgaactgggattcaaactcaggtccctctgactccatagctgtactgtttccactgtggcaaaacatcctgtttctgattcctggtcctctccatttccttatgcatgaccttgggaaatgcatccaamttaacgtgygttttaaggaccccatctgcagagcagatacggtatttctctgtctcccaaaaggtagaagactaggatcactgatttcataaggtactaaaagcactttgtaaatctgcagaggtaattctcccactatttgttctgttattgtcatctgtcctttaacatgtttaagcagtattttatacttaaacaatatttaatactcctccagtggcccttttatttttgtcatttaattgtttctttaacatgaggtaaaagatgaagggatatggggggcagtgtggtgctgaaactacatggagaaatcctggctgaaggatggcactaaaaccaagtgtaaaacctctctgaaagttggcatccaaggcaaaaaaggcattctgatgagttaatttgccaagagtgtaagtttgttttcagctacttagaaggcctggtctctgaggaggatttgtcataaaagcttttatatgaaaagcattttttaccaaaagtgcagtccacatgatgttaaacctccatttttttttttttttttttttttttgagacggagtctcgctctattgccaggctggagtgcagtggcgtgatctcggctcactgcgacctccactgggttcaagcaattctcacgcctcagcctcccgagtagctgggattacaggcacgtgccaccacacccagctaatttttgagtttttagtagagatggggtttcaccatgttggccaggatggtctcgatctcctgacctcatgatccacccgcctcagcctcccaaagtgctgggatgacaggcatgagccaccgcgcccggcctaaatctcagttcttyaaaagcaaatctggaaacaagcaatatggcctgtagcactttcttctctccactgtttgagtttaagcccatctcccacttcctctcccattctttcatcttttcagtccaactccacttccttctggctttccacagtctttctcttttctgttcacactgactgccctacccacctctgccctactccaaacacacagacccctctttggacttcccctccctcccaatggcccttgagctctctctgctctaacaggcagcccagcccagctcattcagctgcttttcttcctccctccacttagaytgactctttctttctggggatcagatmtgttcttcaggggagcagttctcagcaggtacactgcaaacaactgagatgtgtattgcatggaatttgttaccactgttggtaaaactgcccaagttttggaaacgatttactttttatataaattgagaagatttgaggtcatctctctaatagcatcactttctcttgcttgcattctaatatgcttccttgagggggagagagagggtggcatgtcagctggtgtgccaggaattatacgtgacatgcagcctaccttatctgtactgcagcctgtaatctgggtgcctgtgggagtgtgttatgcaccatcacataatgtcacgtgtgtcatggcagagaaaagggtgagaattggtgctgaagagagctggtgccaaggcctggaagaagccagatggttcacaccatccatgagtcatacccttgttcaaagatagggaggttgcagtcaccttggggaagaggtaaaaggctaaaaaggaagaagctgcttcctacaatgtttcagtctctctcctcccttccacccccaaaatgcctttcaaatgaacagtgatgagtgcctgtatctgtatggcgaatcagacacaatccccacttctatygtgtagtggaggagttagacacatacacagctataatgctaggaaggtgggtaaaggccatacaaaaactaataagttaasatttattgagtgcttgctgcacaccaggcactgtcctaagcactttacctgcattaactcatttaatgctcagaatagctatgtgaaataggttcagattattagcatcaccactttacagatgaacaaacaaggctcagggagcttagctcacttgccctctgttagacagcacccaggcagtgtggctccagagcctgtgtgtgctggcccactctagcagccaaagttccatttcccacataagaggagaaacgagctaatgtttttctagggcctgctgtgtgccacttgacttagctcattcatttttcaaaacaactttttaataaaaagataaatgtacatatttgcacacgtctgtatgtggtcacacatgacttagtggttaggtggcattttacaccaaggtgctcacacttccttccatgggcctgctgggggttgctggagcctgatggggtagtaggcactgggcaaggtagtatataaataaatgtaaaggccaagagtttgtggcctattcatttttataattccatataaccctgacagtttctttgtgagtgggtagtattatcctcgttctgtcatcagtaaaactgaggtttagtacagcagtgatgtcctaaaagtcataaaatggcagaggcaggatttaaatctggtttgcttagaagccaaagccccatcccttcctttgtaccctgtagtttacagtgccagagtctaggccacctatagcatgccaggcaaggagcaccttctctgtgtgacaagcaccgagagcagccctcaattccaggcctgttggcatagtragtgatacaggttggacattaagagcactgggctggaggttgaatgcctctgcctctgccactcccttgttatgtgacctatctatgttttgattaacttctcaaagcttaagttttcttatctgcaaaatgaggacaacaagaacactaactctatggctgtggtaagaataaatgtaatagttaagcacaatgcctggctcataggaaatcctcagtaaaccttagctattataattgttatctcccaaggctatccagtgaacaaacatagcacctagagtttgacggagccttgagctgatgctgacactagctgagagaagatccatggcagctctagtcgaggccctgcccaccagtgctaaaacaacttatatgtaatttgtcaatgacatccaatgaccttccttcttccccgattcttcgtaccatcatctggaccactctaaggggtactagctgccccaccttcctccttttagaggaggctggctgagcctctgcaaccccaagaagatggtgtcacatatagcagctaggacatgagctttgcagtggcagacctgggttcacatcccagctccaccactttctcacaagtgagctggggccaggtgattaaccttccaagccttaggtttccttttcagcaaaatagaaacgatgatagtacctmtaatatctggagttaaggtgaggatgaaatgagacaacacatctgaagggcataggcacagagtaagtgctcaatggcaaatgacccatcatctttaagggagggaaatctcaaccatgtgatgctgagttccctgtttgtaccgtaggtacatcgagaagtctgcagaggagctggacgaggaagtagagtatgacatggaygaggaggactacatctggctggatatcatgaatgagcgtcggaagacagagggtgtaagtcccatcccgcaggagatctttgagtacctaatggaccgactggagaaggagtcgtactttgagagtcataataaaggcgaccctaatgcgctagtggacgaggatgctgtttgctgtatctgcaatgatggtgagtgccagaacagcaatgtcatcctcttctgtgacatgtgcaacytggccgtgcaccaggagtgctacggtgtcccctatatccctgagggccagtggctgtgccgccgttgcctgcagtcaccctctcgtgctgtggattgtgccctgtgccccaacaagggcggtgccttcaagcagacagatgacgggcgctgggcccatgtggtgtgtgccttgtggatccctgaggtctgcttcgccaacacggtcttcctagagcctattgacagcattgagcacatcccaccagctcgctggaagctcacctgctacatttgcaaacaacggggctcaggggcctgcatccagtgccacaaggccaactgttacacagctttccatgtgacatgcgcccagcaggctggcctttacatgaagatggagcctgtgcgggagacaggcgccaacggcacctctttcagtgtccgcaagacagcctactgcgacatccacacgcctccaggttcagcacgccgactgcctgccctgtcccacagcgagggtgaggaggatgaagatgaggaggaggatgagggtaagggctggagctcagagaaagtcaagaaggccaaggccaagtcccggatcaaaatgaagaaggcacggaagatcctggcagagaagcgggcagcagcacctgtggtgtcagtgccctgcatcccaccacacaggtatgtggggagccggtggacaggcagatgagggagaaaggagcctccaggagaggagctggcagcctcctgagtggaatggcagggctgggctatcttcccaggagctgcatagaagttaaaaagaacatattttcaaaacagatagttgtctttagcaggtcacctgactttcacattaagagccagaaatgtcagcttttatctggcatagctaacaggcgttttggaactgcccttcattttgatggtgtggtttgttaagttgggatggaagaggatggaactgccactggcagcaatggaaaaaatggtctgaatatgaagaaacaaatagaatgaaaagcggggaaggggaagctcaagaagttgtgaagtggttactgctgctcatttgggctgtgatggccagggatttttttagttctcttgtgccgtttatttgatttactatatatttctgctgtacagttgtacttcattttaaaaccttcaaaggctcagtctcagtggggctcccagggtcaaatagtactctgggctgcagtgactagagcagtcttaggggcagaagtccctgattgctggtgtacagggttagggatctggtttagtgctgggagcttggtttcctgtctgccacggtaccactgatggcaccactctttcttccttgccttaagtccagagtcccaggccttttggacaagagatcctctcccttcatccccattcaggaactttcactggccagagacccttgctctgcttaagagaatcagggcccaacaagttttactctttgtttcctgcctcccaggcttagtaaaatcaccaaccgcctgaccatccaaaggaagagccagttcatgcagaggctgcacagctactggacactgaagcggcagtcacggaatggggtcccattgctacgtcgcctgcagacacacctgcaatctcagaggaactgtgaccaagttggggtactgtgtccagttccctgtgggctctgggaactagcgccagggggacgaaaaccaaaatttgcaactgtagtttccagtgtcagagggcttagactctttcctcctttaagctagccctcaaaccaggatcagcatggaatgttcaatgaaaagatgttgttcctatgtgtttatgtattcattcaacaaacacataccaagcatttattctgccaggccttggggacacacagattgaggcactaccaataaattactgtgctccctcttttggcttgacctgagtttcctgggctctcttctccctgttgacctttcctctggctttctaatcatcctctgatcttcgttttgcctctacagagagattctgaggataagaactgggcccttaaagaacagctcaagtcctggcagcggctccggcatgacttggagcgagctcggctgctcgtggaattgatccgcaagcgggaaaaactcaaaagggagacggtgagtgctcctgggccagccctrttttataaaagaaaaaacaaaaaattagccaggcatggtggcaggcgcctgtartcccagctactcgggaggctgaggcaggagaatggcgtgaacctgggaggaggggtttgcagtgagccaagatcgtgccactgtactccagcctgggcgacagagcgagactccgtctcaaaaaaaaaaaaaaaaaaagacccaggagaaggaatagygtgtgtaccccagccagatagcagcagggctgacgctggagtcagrtctcctggtgctcggtgtgcttttagttctgctggaagcagaatgtcacaggagcgtatgaacagaatcctcagttatgtgacataggtagctggtgctggtagttcaagaaagggggaagccagaattgttggtgcaagtttccctgggtggagcctcatagaaggtagacctgtatgagtacacccagctgtgagggtgggaaagaaggcgggttcccaggccagctgggaccatatcctcagacctctttgccactgaactggccgaggcctggctgatcaggcctttttctatgttagatcaaggttcagcagattgccatggagatgcagctgactcctttcctcatcctccttcgcaaaaccttggagcagctccaagagaaggacacaggcaacatcttcagcgagccggtccctctgtctgaggtaaccgaattggacgaagtaagaatcccttcccctcactccaccttctctctgttcctctcccagttggacccctgctgcaggtctgggccaggactagatggggaccttgaagagaggggctggtggctctggggcaggatgaactggagccacatgtatcacctggactctgtcttgtccctgtcacaccccaagggcccagaatgggaggcagtctgcactccttccccagaggcagggactgagtctgccaaatgaataatcccagggcaggaagacactttcggggtgctgaaccctagaacggagactttagaaggctcagcacctaaagaaccagctctgaagccctaggtcctgactggcagactcttctctctaaaaggtataaaatgagaggcctgaggcagcagcctccttataagttactgttaagtaaaaagagctgtaggaatgcaaggtggtgtttattttcagaggagtccccaagccattttcttactaaagcctcatatagtctagaaagtatatttggctctactttcatcattttccaggagaggaaaagtaggcccagagaggttaagagacttgccaaagtcacacagcttgtgactggtaaagtcaggaccagaatccagctttcctttcccctgtgctatatgcctgcctctaactgtggtgggaggaggttgctggatgtgtttcaggggggcttgttaggagcaggkttcggggcaataaggaggatatctccacttaaaacaaacctgccctgcccttccaggtacctgactacctagaccacatcaaaaagcccatggactttttcaccatgaagcagaacttggaggcttaccgctacctgaattttgatgattttgaggaggacttcaacctcatcgtcagcaactgcctcaagtataacgccaaggacaccatcttctaccgggcagcagtgcggcttcgtgagcagggtggtgctgtgctccgccaggcccggcgccaggcagaaaaaatgggcattgactttgagacgggcatgcatatcccccacagcctggctggagatgaggccacacaccacactgaagatggtgggtgatatatcacacacacatataagaggccaatgccggggatggacagctttccaaaagtcccctcctgggagcaggcagtgtaggcagaragcagctaggctgagcagtggcaagctatccccaggaatgctccccaagaagccagactgggtgaatggatagcagtgcccgccattccacatcttggtgctgctattttacagctgttcctggtgagaagcccaggggggatgagtgggtttcttgctgcctgcccaggttcaaggggccctgagggctgccctgagtctgacctttcccctccaaccctacccctagcagccgaggaagagcggctggtcttgctggagaaccagaagcacctgccagtggaagaacagctaaagctgcttctggagcggctggacgaagtgaatgccagcaagcagagtgtgggccgctcacggcgtgcaaagatgatcaagaaagagatgacggcactgcggcggaagcttgcccatcagcgagagacgggacgtgatggccctgagcggcatggcccctcgagccrgggtagtctgacaccccacccggcagcctgtgacaaggatgggcagacagatagtgcggcagaggagagcagcagccaggagacaagcaaaggtctgaatcccatggcaaggtggaccccaaagcaagtcagactttggctctgcagcacacactcaacccctgccattccccaggcagaggtccctcctacacagctagctgtactttctccctcattccccaatcaggggcctcttagctgcctctctggctatttgtataagagttamtcttccaaattccaagcccctaaaatgatctccccaacgttagctggagtaatggtcctatatgcccagggcatgaccctggatatctacccttctcaaatcaggcccctcaccaactctccttctttctttctctgctccaggcctgggtcccaacatgtcctcaacccccgcacatgaggtgggcaggagaacctcagttctgttctccaaaaagaacccgaagacagctggaccgcccaagaggccgggccggccccccaaaaaccgggagagccagatgacccccagccacggaggcagtcctgtggggcccccccagctccccatcatgagttccctgcgtcagcgcaagcggggtaggagcccccggcccagttcgagctcagacagcgacagtgataagtccacagaagaccccccaatgggtgagccttaccatcacccagccccccaagagagtgagcaaagctgccattcttcccagcatactcccagttacccctttatttgcccataaaagagcgagctagaagggtccttaggaatcctttaactccactcactcatcttacagttgggaaaactgaggcccagagacactacgacccagctaaagtcccatccagggccccctgcctccattgtatcactttaccttttctcttctcaccttccttggggatctcctgccctttaagccatttgtgtcctaaagccagtaactgccgagggaagcaaggggtggagcagggctgtggccaactgtggtagacactgcccagagctagctctgctggccaaggttggaggaattttccagcacagaaggggaacccaagctccaagtccctcttacctccatgtcatctctgatctacatcttcctgaccggttccttccctcctccccttcccttcaaccaagacttaccagccaatggcttcagcggtggaaaccaaccagtgaagaagagtttcttggtataccgtaatgactgcagccttccccggagcagctcagactctgagtccagcagcagtagcagtagcagcgctgcttcagaccggaccaggtaccagccctccagatcgaggccaacctcaggggatgcccttccagggctcttgggcctgtgtaggtttccctgttggaagtggggtggcagccatctcagtctagattaagatggctcaaactcaaggttctctgctaaataaataaatcagtgttaccattaatagaacagagagaaccatcctggattaaggtgatgattagagtatgcactcctgccgccactgctcaggctaacccacctctgttaggtcatcagcctagcccctgtgggtgtttgaatttgaaattcctcatatagcctctgctttccaaaagtctcagaccctgcgggctttaagagctgagggcacataccatgctgttccccattcttcccctcctttgagctgagctcccattgtcttgtccacagcacaacgccctcaaaacaaggccggggcaaaccctccttctctcggggcactttcccagaggacagcagtgaggatacctcaggcactgagaatgaggcctactccgtgggcactggccgcggcgtgggccacagcagtaagttcccttgcccaaggccagggatgctggggacccagtgtcagggtctcgccagccccccagctgctgatccaccccctctcccccattcctgtgaagtggtaaggaagagtctgggccggggagctggytggctgtcagaggatgaggactccccgctggatgctctggacctcgtgtgggccaaatgccgaggctatccatcatacccagctctggtatgcttgcttctgttacacttcttgctttccaatcccagaatacagattcacagttagcagacttttcctactccctgctgagctgtggggcacagagtttcttggtaaggtagactggtgggcagatacagcttgagtaccacttagaggctcccactcagtttctccatctctcccttttgcttctctttgctccttgggctctgaaataatttagcatggaaagaagctgagggtcagcattgcagttctagtagcatgataccctctctgtccccacttcagacatactctctaagttcttgaggaggaaaagccttgggaggacmtggactgaaccaaactgggctcttattatatcctcagatcattgatccaaagatgccccgagraggtatgttccaccatggggttcccatccctgtgcccccactggaggtgctgaaacttggggagcagatgacccaggaagcccgagagcatctctacctcgtcctcttctttgacaacaaacgaacctggtaaggaggggagcatttggtgtgactcayagccacagatgcagccctgtgtggtatgggggcagactgccaggaaactccagcaacaggcagactgggctatcacaagtcagtgggggagggacttagaacagttttttgagcgaaagggttgtgtcgaccatgtgtctgagaggctgagtgggcactagtggacacagctatagctagaaaccaaaggaccatcagagacttakgacaaatatagaggtggctcccacccagactcagatggcttctagacttagttttcccacctctgcctccacagtgacaaaatgaggataaagcaggcataaacattcaggctctgaatccctgttctgtcacatttacacatgtagtctttttgttaattgtctgcagaggatattcaatgtcagtaaagtctgcctagagcctatggcacagggtagctatttctggtgaggtcagggtgcctcctttttgtacccataaataccctgtgattaccctcccgccgccaccacacagtataactgttgactgggctctttcatctctagaccatgaacagtcctttgagggcagggaccatcacagagtctggcmagagtgggtgcttgggtggtgtgtttgagtgaatagaggaggaaggctggtccttgttctccctgagatgatttatttgatcttcaccttatcctataggcagtggctgcccaggaccaagctggttcctctgggtgtgaaccaggacctagacaaggagaagatgctggagggccgcaagtccaacatccgcaagtcagtacagatcgcctaccasagggctctgcagcaccgcagcaaggtgcaaggcgagcagagcagtgagaccagcgatagtgattgatactgctcaacacagcccaacctatagtgccctgtgacttctctcctcccctttgctcactgtcctggagtggcaccggcctctgcactgactcatttctggtcttggggccagtctcaggggaagctgggtgggggaggtccctcctgccctaagtgcagctggactgtacagaacactccaagggccaatggcagttcagcgcaaggagagggagggcccacaggtcagaaaaagctccagagacctcacagcattgtagggcggggtggtgggccaaagttaggacactgcgtaaaacaggccatsccaccacctctacctgctcatgccaggagaatccataactgcctagaggcctggggcccctaccggtcgtgaggtgagtgggcatctgtccagcctggaagaggggcactaggtgactccctcccctgctgttgkaaatactgtaattatcggagaatttaaattattctcatttgtaactgcgtttccgggtcgcgccagagtcatttggtactaaaaaaaaaaaaaaaaaagactgggggctgtccccatttcccttctctttcccatagattcccccacctttcaaactggtttgtatttatttcaaaggaagaaaatatattgattcttagaaaataaactgtcaatttagaattctttgttcttgccccctgccagggcaaaggggatacaaagggaggttctgtgccccagggatgatacataattgggcccaagtggttgctgactgctgtgcatgctacatttcataagacacagcaaagagagcccctgttgcccatgcatggagtgagtggcaggccctgtgttgagcacctttagacattcagctttgcgtaatccttgcaataactatagggtagtttaataatagactggttatctccacaaagatgctgaagtttcaaaaaattatcttgcctaagttcctacaactaggaaggtgcagagctagaattggaacccaggtctgtttgcaaacctggctcttcaaccagtatgctgaactgccaggggaagagtcaactatcgattcctacttggcccttagaggcctcaagtcctttgccagtggcatggcccaagtgtttcagcatcaatacagctgagaccttccccactgcttaaccggagacagagctgggatggagacggttgctctttgctcacccccaacctcagcaccttctttccagactccaccgacatttattgaaggaatgccttccaagtgctaggcgcctgtgggatggcatgcctacagataggaacagtcacaggaagaaggggcggcccaggccttgcagccactgaggactggcactgagacaatgatggcactggtctgatgttgattccatgctgacggtacactccgctaggtctctggctgggacacaagggtcaatccgctgcagatgttgctcttcaagaatttgcagtctgggcggggtgcggtggctcacgcctgtaatcccaacactttaagaggccgaggcggctggatcacgaggtcaagagatcgagaccatgctagccaacatggtgaaaccccatctctactaaaaatacaaaaattagctgggcgtggtggcgcgcacctgtagtcccagctactcgggaggctgaggcaggagaatcgcttgaacccgggaggcggagcttgcagtgagccgagatcgcgccatcacactccagcctaggcgacagagtgagactccgtctcaaagaaaaaaaacttgcagcctgatagttaagatacagcaaccccaaatccctatgctaaaaggtgagaatggcccagataaaggtcatgtctcctagctccctgctttttcatgccatcctccagaagggaagaaattaaataatccatcctcctactccaggcgactagaaggcaggctgcctcagggccacacactgggacttggactcaacctgatgggcttctgggcccagccccagacaaacccccggcaaacgtcccattccgaggaaagcatgagcagatggagtatggaagaaatgcccaagacggcaggcagcagctgtggcggccggcgggacgacaatccgaggagaggcctctgatgtcctgaggtctcagaggacgcctaaaggccttgaatgggacaagcttagcgggcgggcgcagaagagaataatactctggagacacttcccgagggctctggggccggagctgtgttcgctccggttcttggtgaagacagggttcgtgggaggcggcccaaggagggcgaacgcctaagactgcaaaggctcgggggagaacggctctcggagaacgggctggggaaggacgtggctctgaagacggacagccctgaggaaccgcggggcgcccagatggaactcgttagcgccccgagtgcagacaatcccggagggggaaaggcgagcagctggcagagagcccagtgccggccaaccgcgcgagcgcctcagaacggcccgcccaccctgatttctcattggcgcctcctacctcctcctcggattggctacctctaggtgaaatgagcggtggttgagccctacttccggtggtgctgtggtctgcccctggagaacccagaagaacacagctgtgcgcgcccacaggctctgggggcgggagaagataagtcgcaaggagggggcgggacctacacctcaggaaagccggagaattggggcacgaagcggggctttgatgacccgcaaagggcgaggcatgcaggaggtggaggaattaagtgaaacagggaaggttgttaaacagcaccgtgtgggcgaggccttaagggtcgtggtccttgtctgggcggggtctttgggcgtcgacgaggcctggttctgggtaggcggggctactacggggcggtgcctgctgtggaaatgcctgcccgcgcgcttctgcccaggcgcatggggcatcgtactctagcctccactcctgccctgtgggcctccatcccgtgccctcgctctgagctgcgcctggacctggttctgccttctggacaatctttccggtgagtgactgagcctgagaagcctgtcccctcggactggctcctgccgcctcaacactgcctggcatggggtacaaaggaatttgggggatgatggaagaaacccggggtacaaaagaggaaacaagcacgggtagccaacctgttacctttaatatgtctgtacagtgataattgtaaggatccagcggtataaccgatgcagaagataatagcacttgtttttctttttttgagacagggtctcgctctgttgcccaggtaggaatgcagagaggcccattccagcctcgaccccccgggcgcagcctcccgagtagctgggactacaggtgtgcgccatgcccggttaaatttttgtattttttgtagaggtgaggtttcgccatgttgctcagactggaagatagcactgttacttgtattagtttcgtacatggagctattgtaggataggagggaccccaaagggtgcaagaaaggaaattgagtgccagggttgtcatgtgccttgggctcaggtggagggagcaaagtcctgcacactggagtggtgtactagcggatcaagtatggacactgactcagactgaggagcagctccactgcactgtgtaccgaggagacaagagccaggctagcaggcccacaccagacgagctggaggccgtgcgcaagtacttccagctagatgttaccctggctcaactgtatcaccactggggttccgtggactcccacttccaagaggtggctcagaaattccaaggtgagtacaggacctgggctggggttagggttcttggacataagtcacttctctatgactcagttttgccacctgtaaaatggggattatatctacttcataggcttttatgaggatttaaggaactaatacatgtaaagtgcttagaataatgccaggcacatagtaagtattattaccattattattatcctgctaatcaccatagtgaagtgacaaggattttgagcccattcctggttgtgtgacctagggcaagtgatttcattcattctgtaaatatatacaaagcatctgctgtgtgaccggggatacaccagtgaacaaaacagacccaaatgccagtcctcatggagcttacattgtggcctctttatctgtggaatgggatggtaactcagccctcacaagatgctatgaggaatgagaggtctggtgttgctttctctaacggtgctgactctcattctcctgggatcctcctggagttttggtacctaggatctgacctgtgggtgggaagaggccacacccaacagcaggtacctctcctaccccctgcatttctggtctccaggtgtgcgactgctgcgacaagaccccatcgaatgccttttctcttttatctgttcctccaacaacaacatcgcccgcatcactggcatggtggagcggctgtgccaggcttttggacctcggctcatccagcttgatgatgtcacctaccatggcttccccagcctgcaggccctggctggtgagtaggtgggtcccctgcccccaggccttccatcagctttcaagatctgttcatttctcccctggttaccttctcaaggcttcctgccttcccaaacacttcccctatccagaaccgccctgcctggtctgatcaactccagttactcatcctccctatgcatccctaaaatgtcagcacctcactggtctgtgctttttgcccaatgggttcaatgcctaatcagaaaaatatctgtatacaatgtacagtagtttggggttaagagcatgcattctggggacagacccatgcctggttctgaaccccaactctcacttgggcacattatttagcatctctgtactaaagtttcttcatctgtgaagtagaataataatagcacctacctatgctattattggagttgtcatgagggttgaagaaaggaatatacatactgcacctagcacagtgtttggcacacaggaagtatatgtaaaattcaagctggtatcagccaggcgcagtggctcacacctggctaacacagtgaaaccccgtctccagcctgggcaacagagcgagactctgtctcaaaaaaaaaaaaaaaaaaaaaaattcaagctggtatcattgtagtgaatgggatagttttgtatctaagaacacgtgtgttcttcacagtagccctgtaaggcaaatgttttacagaggcaagtgtatcgattggcagatgtgagaaccaagctaggacaagtgcttgggaactgcatagcaaagagacagactgcctcaaaacaggagaatgtttttggtgcttagaaacccattcctggccgggcgtggtggctcacgcctgtaatcccaacactttgggaggtcgaggcaggcagatcatctgaggtcaggagttcaagaccagcctggccaacatggtgaaaccccatctctactaaaaatacgaaaattagtcaggcgtgatggcaggcacctgtcccagctactccggagggtgaggcaggagaattgcttgaacccgggagcaggaggctccagtgaaccaagatcagaccacagcactccagcctgggttacagagcgagactccatctcaaaacaaacaaaaagaaacctgggtcaggcacggtggctcacacctgtaatcccaacactttgggaggctgaggcaggtggatcacctgaggtcgggagtttgagaccagactggccaacctggtgaaacccgctctctgctaaaaattagctgggcgtggtggcaggtacctgtaatcccagctactcaggaggctgaggcgggagaatcatttgaacctgggaagcagaggttgcagtgagctgagatcatgccattgcactccagcctgggcgacagggcgacagggcgagactccgtctcaaaaaaaaaaaaaaaacctggccgggcgtggtggctcacacccgtaatcccagcattttgggaggccgaggcgggtggatcacgaggtcaggagatcaagaccatcctgcctaatacggtgaaaccccgtctctactaaaaatacaaaaaaaattagccgggtgtggtggtgggcgcctgtagtcccagctacttgggaggctgaggcaggagaatggcgtgaacccgggaggcgaagcttgcagtgagccgagatcgtgccactgcactccagcctgggcgacagagtgagactctgtctcaacaaaaaaaaaaagaaacctgttcttgagtctcagctcctggcttagttagtcataaggcctcaagaaagtcattcacctcttccggcttctcttagcttgtttgtagaatgggaataacagtttctatctagaagggctttgggagtgaataaagcaatcatgaggcagtgtagtgtaatgggttaagagcacggcgttagccaggtggggtagctcatgctggtaatttcagcacttttgggagcccaaggtgggaggatggcttgagcccaggagtttgagaccagcctgggcaacatagtgagacctcatctctacaaaaaataaacaaaattagccaggcatggtgacacaag

SEQ ID NO: 97671 - DNA, 24643 bp, Homo sapiens
gcaaattctcaggccacagacctactgaatcaacagctctgggtgtatagtcaggcgccgtggctcacacctgtaatcccagcactttgggaggccaaggaaggcggatcatctgaggtcaggagttcaagaccagcctggccaatatggtgaaaccctgtctctactaaaaatacaaaacgtagccaggcatggtggcacgcacctgtaatcccagctacttgggaggctgaggcaggagaattgcttgaacctggaaggtggaggttacagtgagcagagatcacaccactgcactcaagcctgggcgacagagtgagactgtctcaaaaaaaaaaaaaaacctctgggtatggggcatagccttacattatatataacatgccttctaggtgattcctggtgcatattaaagtttgagaatcacattctgaagtaacagggagccactggtggtttgtgagcagaaagcactctcagagcagcatagaggctggactaatgagagggagtgagggtgaagttggtgcaaagaaatacaagtgagatgtggaatgtggcagactggtagatgtcctccaaaatctgtttcagtaatatctcatgtggaaactggaatcatacattgaaaatactctccatacatttgatagcaaatggaaattaagtttcacatggtgatttcttatcaaaacctttaatcaaaagctcagggcatattgttttttgtttttttggggtttttttttgagacagggtcttgctctgttgcccaggctggagtgcagtggcataatctaaatcactgcaacctcagcctcccaggttcaagtgattctcctgcctcaacctcccgagtagctggggttacaggcgtgtgccaccacgcccagctaatttttgtatttttagtagagacagggtctcaccatgttggtgagaactcctgggctcaagtgatcctcctgcctcggcctcccaaagtgctgggattataggcatgagcccagccaaaaaaaaaaaaaaaattactcaaacatcttggagcatatagccttgtcctaatttaggattacttctctgaaattgattgccagaagaggagtccctgaatcaaaaggcctcgacattatttaagcctttgatgcatattgccaaattgctttccaaaggatctttagcaaatcattttcccaccagaatgtaggactactcattcctcacatcaacatcagccttcagtgttaccagctttttaaacttcaaatttgaaaggctgcaaatgaccttctattttgtacttttttgtatcactagtgagatacaaaatgtcctgtgtttactgtgttttatctgtatcctttgaccatttattaggttcttactgtttgttatcaatcctgtgtgctgtttatataataaatatattaagccattgtctacaaaacatttccccagtctgaagtttgcctttcatttttggctaccatttcggagtagagtagggttttcactttttgaaaaaaagttaaaaaaaagtaacaaaagttaaagttttgtttttttttttttttttttgagacagagtctggctctgtcattctggctggagtgcaatggtgcaatctcagctcaatgcagtctccgcctaccaggttcaagtgattctcctgcatcagcctcccgagtagctgggactacaggcatgcgccaccacacctggctaatttttgtatttttagtagagatggggtttcactatgttgcccaggctggtcttgaactcctgacctcaggtgatccttctgccttggcctcccaaagtgctgggattcaggagtgagtcaccacgcccagccaaagaattttaaaaaataaacctgtccatcttttccttgttatttcttccattttctctaatcttagttaactactcactctttcaatagcttcttttctgtcaggttcaagaattcatggaggccagccatactggctcacgcctataatcccggcactctgggagacccaagcaggaggatcacttgattccagagttccagagaagtctgggcaacagagggagtagagacccgatatctacaaaaaataaaaaactaaaaaaaattagccaggtatggtggtacacacctgcagccccagctactccggaggctgaggtgggatgatcactccagcctgggaagtcaaggctgcagtgagccatgatggcgccgctgcaccacagcctgggtgacagagtgaggccctgtctcaaaaaaataataaataaataaataaataaaagaattgatggagatgtctgcactgtttagccattcaaaaaaaaaaaaaagaagaaaagatcatcccccttttccctgagaacatttgactttccttgactcacctttttttaaattattattcatttatttatttttgagacggagtctcgctctgtcgcccaggctggagtgcagtggcgcgtggtctctgctcactgcaagctctgcctcccgggtccacgccattctcctgcctcagcctcctgattagctgggactacaggcgcccgccaccacgcctggctaattttttgtatctttagtagaaatacaaaagataacagggtttcaccatgttagccaggatggtctcgatctcctgacctcatgatccacccgcctcagcctcccaaggtgctggaattataggcgttagccaccgcacccagccactttttttttttttttttgagatgtagtcttgccgtgtcacccaggctggagtacaatggtgcaatctcagctcactgcaacttccatctcctgggttcaagcaattctcctgcctcagcgtcccaagtggctggggatacaggtgcatgccaccacacccagctaatttttgtatttttagtagagacagggtttcaccacgttggccaggctggtcttaaactcctgacctcagatgatctgcccaccttggcctccccacgcctggcccttcactcactttttgattagtactttgaaatgtgctcatcgggactgggggctgcagaaggatgtatatgtatacgcatccaaaaaatctggaagaattgtactaaaaatgtgaacactggttgtctctggttggtgggggcccggctgagagtgttgtgttattcttgcctccctcgcacccctaattcctttggacaagatacctcttccattccttatggctgcccattacagtacacttgctcaatatagcaccctaattctcctggcaacagttttggaggccaaggggtgaacatgtcactctatcactcaagcagagccagagtccttccctgagaatgagataggaaattgggaggatgctttccttccactgtgtttaattggaaagctggggctgcctcactccatgtttcctgccaactagaagttcactctggagagaaaaagaggccaacgtgtgaagaaaaatcaagacaaggagagaggagggaagacagagaaagcaaatcctatgagtactacatctccagttccagtctccaagcccctaatctctggtgtttttcctgcaatcttgtgccagctattgtgaactatagattcctcttggatgaagctggtttaggttggcattctgtcacttgggaagcgaaagaatctcatcagttagtctgtgtgtgttttcaatacattatggaattttcctgcaatgaccatgtatcacttgttcaatagaaatactaagaaagtaaagataatgtgtttgttaaagaaaagaaaacacgaggcctctcagaaatgctcaaaagcaggaaaaatgtaaagcacaccatagaagctgtacaagtcagctgggcgcggtagctcatgcctgtaattccagcactttgggaggctgaggcaggtggatcacctgaggtcaggagttcgagaccagcctgaccaacatggtgaaacccccatctctactaaaaatacaaaaattagttgggcgtgttggttcacgcctgtagtcccagatacttgggaggctgaggcaggagaattgcttgaacccaggaggcggaggttgcagtgaggcgagatggcaccattgcactccagcctgggcaacagagggagactgtctcaaaaaaaaaaaaaaaaaaaaaaaaaagaagttgtacaagtcctcgaaaggacagaggtcatcttatcacccagggggtgttgtcatcaagatgaacaggaatttgtggtaaaagaacccctagctcagtgggtgtgcttggtgggtataggggagagtgggggctcagccctgagcaggaaatgtatttttccatgaactaaggagtctgagatactgagatttggaagatggatcccttaacccctcatccctggccaaatcaagtcctctctctgagtctcagtttacactgagtctagctctcatgttttgaatagtgttctaggcacttcatatcattatatcatagaattctcagaactctgagtcaatcttcaatattcccatgttcccgagtaagaaactgaggttcggagaggtaaagcatgaccaggatcagttagactccaaagcctttccaggaacctcagctatcttcctctctcatctgtaagatgggcataataaattggccaggtgcagtggctcatgcctgtaattccagaaccttgggaagctgattggggaggattgcttgagcccaggagtttgagaccagcctgggcaatatagtgagatccccatctctacaaaaaataaaaaagccaggtgtggtggcacgcacctgtagtcccatctacatgggaggctgaggtaggaagatgacttgagcccaggagtttgaggctgcagtgggccgtgatcatgccattgcactccagcctgggtgacagagcaagaccctgtcttaaaaaaaaaagaaaaagaaaaaaagaagaagagaaagaaagaaaaaagaaagaaagaaagagaaaaaggaaatgagctgggcataagcactgttctctccccatcaccagctggaacatgcaagaattcaggagtagggagtggcacttggaggcccttggaggtggagtggggtcccaagcaacgtgcctcctccggctgcccccagttcagccccatccccaattcctgcgagttgctccccccgccccctctttccactcggcaccaaatttcttcccaaggaaggccttgagcaaaccgacctttggcctcttgcctgccgtcctagttgcaggctctctcccctaacctggaccccagccatcaaactctggagccccgccagtcacgtgacacctcggtcctttttggcctgtttccttcaggatcccgatttaacttcctcctccccaattccctctgcccccaatacctctaggcaccaccacccgctctgaggagcaagtgtctggggctgaagcctcagctccatcttgcagaggaaccggggcctcagtcttcccacctgtcaagtggggcccacaccctgcgaccacctccactctcttcattgcctagtcttgcccggtccttccccactccctcactcccccatcccccaccagactcccgtgcagttccagggcctgtttcccttcagggcacggagaagggagacagagccctaagggaggtcgcagaactggtctgaaagaaaatccaccaggccacagggtgagtttggccggcctctagcttcagacagacggggttcgaatcctgctttgcttccgaccacccgctgatttgaaaatcatctctccgggcctcagttgtcccctctgtgaaatggaccccgcttaagaccaagggcgggaagcgtccagcaggagatctctgaccagaagcagggagatggcctccacccgtgccccttccccagccttggagcggtgcctcgcctcccaatcccgggtccctccgccgcaggctccacctccactgacatcagagccgcaggcgggcggagagagccgccgagccgagccgagccccagctccagcaagagcgcgggcgggtggcccaggcacgcagcggtgaggaccgcggccacagctcggcgccaaccaccgcgggcctcccagccagccccgcggcggggcagccgcaggtacagccgggccccccatccctgcacccctgggcgctgcgtgggggcggtgggagcccctagcctctgggtatcctttcccaaggagtggccactgggcactctcccgggcgggctggaccctgaggggcagggctgggcctttctccacctctgtcccaggcccagcaggtgccaggcgggcctatgggacactgagtgggtaatagagaagggggcctgtgtgagcgccttcagctgggcctgactggaagggcgtgggcatttggaggtatccatggggtgggggggcttgcggagtgtactgtcttaggacaggcgtgtgggtcagacatgggtggaggatctgggaatctgtgtgttttttgttccagaggggtgtccacgtgttttgtgtgctggtatttggctctcagggtcttaagtcagagttaggagggggtgtacaattgtgtactgaggatgtttggagttaggtgtgtaaggacttggggtttggtttggaatacaggagcttccaggggatggggtagargagctggagggtgtagggtacgtctggtatatgagggtgtgtgtgtgtgtgtctgggtgtcatcttgtgtgggtgcgggtggatgtgtgttttggggtgtaagagggagctgggtgagggatgtttggatggacaggcaggtgttcgggtgcagggctgtctggggcactgtgtggtgtggacatgtgtgctgatgtctgggagtacatgtatgatcaggtgtcacgggatgtggatacaaggcgtactggatctgggaggcaggtgtttgagttcagggctgtggagggggcttggtgtggcatgtctgctacagggatgtgtgtggatctgtgagggttgtatttggtaggcctccatgtgggtttcagactctgcctctagagcttacactcgagtctcctttcctagaagattctgcccctggatgggtgggcagrgtcccctgggaaaaaggtcctgttccaggagtggaatctcacaccagaggccctagtcagggcaccttctcctcattctcccttagagaaaaagagagaaggaaagtgctctccctgaggtcacaaagcatgctgggctctgttttggcctcatctgtggatgggttgggaggctgtgttctctgaatggggcccattctggcttcatattggaagtaccagccaaggccattcgatggcctttgccctcagcaagcttagctgggggccccaggccaggtgtcattagggcctctggagccagcctctacctaactccaacctcagtctccccattcttcatctgataaatgggagagaactcccaccctctcctgctggatgagacagacctcagcagaggaagggccaggctggatagggttagatggggccaggaagggacagagtgagcaggaccatttctcatgctccygggacccagatggggagtcaggagggagaggtctggggagctccagctgtggctgttgttgctgtggtaacagtgcagaaagagctatttaaaaatgtggctgagatgttgctggaagcccaggctgctggaaacctgatttcggagaggccggggagtcgggggaaggaggagggaaaggagacaccccagcaatccccagggtggggcggggacatcactggttctggggacagggggatcctccaggcttctaccagctgctctgggggtttatctgttgtactgccagaagtcagggtttccctaggtgcttggatttggatagggggaaaactgggaagagaactagaataaatgaatgaatgaatgcatgactttgttaaataaagaattttgctgccactgtgaaaggtttttctctaggcatgagaatttgctgaatgttgaataaacaaatgaatgtttgttgaatgattttgtcaaatggatgaatcaaggatgaataaatgcaggttgaatgactgaatggggcctgcagtaaattcccagacagagggctgggctctgctgagtctcctccttccattctccttacaggagccctggctgtggtcggggggcagtgggccatgctgggggcagtggaaggccccaggtggaagcaggcggaggacattagagacatctacgacttccgagatgttctgggcacgtgagtccagggcaggattgggtgctggatggctgagggaggctgagtccagggtggggcttcctctggtcaattaatgcttcctgtttcccacagcccaggccctgtggcagcactatctagggcctaaactgtccccagmttttcacttctggatgacagtgggtgggacacgggctgctctcccaatagccctgggttcttgaagagaaagaagtcgagagaatgaaggtgccagtcagtccatttaacttgctgccaagagctargtgttctagcctaggtttgggaactgaggctggagatggctctgttcttggtgctgggaatgcagaaataactcaaacctggtctctgcccttcaagttgatcccagacatgtgcaagagacagacctacagaaaatgacaacagggtgtgtgctgtgctccaattaaggttgggattgagggctttgtggagcccagagagagctgtgccttctgcctgggggaaaacttcctggagaatggggcattagagctggggactgaaggatgggtaggtgtgcacttgtcagagaggaagaaggacattccaggcagaaggaatagcataaacaaaggcttagaggcatggttctatgtggagagaggtagagtgtgatggagcttaaaatcacaggctggggggagagtggaaaaaggggctggagatgaaagtgggacagtttgtgtagggttttggaagccaggccagggaggctggatattgtcccataggccaccgggagacacttaagactttttggcaggtgtgcaattcaggatagtcactctggccacagcttggagggtaaattggagagggacaagactggaaaccagtgatgaggttactacagtaactaattatccctgaggattgaaatttcaccacgagagatgcttttctttgacttatgacttcttattctcccagagaaagcaaacagatgtggaaagaataccctagcaaatcctctttaatcagttaactttagttaaatgagtttatttgttcctttttaagaacctgttctaaaacactgcttcttaaagttcaatgagcatacaaatcacctgaggattttgttaaactgcagattgatttagtaaatctggggcagggcctaaagttttgcatttcttttttttttcttttttttgacccaggatccaaagcagtagagattttgcatttctaaaaaagttcccgggtgatgctgatggttctttaaggttctaaagggtgttaaattagccatgactcgaattagcagaaaaagggatgaaccaactgtacacataatccaaaagcccaggggtagacctcaggcatggctggatccagagggccacataatgttatcaggaaatatatttggccatttctcaggttggacttcctttgtgttaatttcattcccaagcaggctctccccaggtggtggcaaagatgatcgccattagctccaggcttacatcctaccagctcaacaggagactcattctcaaagtgctagtaagctggcttgcatcacatgaccaattactgtggccaggggagagactactttgactggccaggcctgggtcatgtgaccatctctggagccaggggatggatgagtgactaggggagggtcatccacgtccttggtccagcagtggtcacagaacccatagggaatggaggagaggctggagggaagctggggttccagttcttcaccttgtgaatcccctctcccgataggggggccttctcggaggtgatcctggcagaagataagaggacgcagaagctggtggccatcaaatgcattgccaaggaggccctggagggcaaggaaggcagcatggagaatgagattgctgtcctgcacaagtgcgtgggccacagcctttccctgccccaagctgaccctgccttggccctcccatcctcctcctttcctgctttggacaaatcatttaaactctctaagccttaaattgcccctttataaaatrgggatcacaatttccacttggcagggttgtggggaacatcagaagtcctttatttcaagtgcctggcctaacatgacagatgtgatggaggtgccagtgcttagtcacaggggtttaactgttcaatcaggtgtaaagatccatcctgaacatggcttggacccacatatctcagttggtgttgtctctggacctacctcaagttcccctcacatattaaaaccactcagcaagtttaaaaatgactgtctgctgacccccagactaaatccacaaccaactggtctatgaattgctcatgctgatatgaaacctcctgtcctcactggaaaacttacagagaatcacttccaatctctcccctgagcttccaaccaccctgggcagataattttttttttttttttgagatggagtctcactctgttgccccggctggagtgcagtgacgcaatcttggctcactgcaacctctgcctcttgggttcaagcaattctcttgcttcagcctccctagtagctgggattacaggcacctgccaccacgcccggctaatttttgtatttttagtagagatggggtttcgccatgttggccaggctggtctcgawctcctgacctcaggtgatccacccgcctcggcctcccaaagtgctaggcatgagccaccacacccaactcctggcagagcatttctaataagacccagagaggacagggatttgtatacagtcacatggcaagtttgtggcagagctgagccttcctcatcatcaagatcaattatcgcctgaccaacacggagaaaccctgtctctactaaaaatacaaaattagccaggcgtggtggcacatgcctgtaatcccagctacttgggaggctgaggcaggagaattgcttaaacccgagaggtggaggttgcggtgagccgagatcacaccgtgcattacactccagcctaggcaacaagagcaaaactccatctcaaaaaaaaaaaaaaaacaaaaaaaaaacaaaaacgccaggcgcagtggctcacgcctgtaatcccagcactttgagaggctgaagtgggcagatcacctgaggtggggagttccaaaccagcctgaccaacatggagaaactccgtctctactaaaaatacaaaattagctggacatggtggcgcatgcctgtaatcccagctacttgagaggctgagaaagaagaatcacttgaacccaggaggcagaaattgtgatgagccaagatcatgccattgcactccagcctgggcaacactccagcctgagcaacaagagtaaaactccgtctcaaaaaaagaaaaaaaaaatcaattaccattattgtttcacttatgagtatttaccgtgtgccaggcactgtgccaagcaccttacctgcattatctcacatgatcctcactccaactctttgagggaagtactaccattggcttcattttatagatgaagaaactgaggttcagagaggttacattaaatctagcacctaccctgtaccaggtgctggaggaacagtggcaagcaagacaaagcctctggattcggggagcttatgtctggtgggggaggctgacaaacatgtaaacacagaaaactatatatatatattttttttgagatggagttttgctcttgttgcccaggctggagtgtaatggcatgatctcgactcactgcaacctccgtttcccaggtttaagcaattctcctgcctcagcctcacagatagctgggattacaggcatgtgccaccatgcctggctaatttttgtatttttagtagagatgggttttcgccatgttggccaggctggtctcgaactcctgacctcaagtgatccgcctgccttggcctcccaaagtgctgggattacaggtgtgagtctctgtgcctagccagaaaactcttaagaggtatgtatcaggctgggtgcagtggctcactggtgaaaagatctgcacccaaatagcatgtgacgggcaggatttggacccaggtctgtgtatgccagagcccagtgtttatccctctgctctctcaccttccaaaaaatggtaataaaccatggtaagctagcttttccctttggggacgagatccttggtttgtcctacccaggtatgtaggcagtggtcgggggttgggggtggctgagctgtcctgagctctaaaccgctgtttttttttttttttttttgagacagggtcttactctgttgcccaggctggagtgcagtggctagtcacaggtgcaatcataacagactgcagctttgaactgctggggccaagtgatcctcctgcctcagcctcccaagttcccaagtagcttggactacaggtgcacaccgccatgcctggctaaaccacctcatttctcctttcaggatcaagcaccccaacattgtagccctggatgacatctatgagagtgggggccacctctacctcatcatgcagctgtgagtggcccaacctctgccctgcccccacacctctcccagctgtcccaaccctctttgccagactgccctatcccctgctgcagggtgtcgggtggggagctctttgaccgtattgtggaaaaaggcttctacacggagcgggacgccagccgcctcatcttccaggtgctggatgctgtgaaatacctgcatgacctgggcattgtacaccgggatctcaaggtggggctcaagggggtgtggtgagctagggtacccaggggtggggcctttgcaaaccccaaactgtctgaccttgggcaactttcaccccctcactgagccttggatttccatctacaaagtggatcttgtaacctttaaactgcctcctcccattctagtccagatactcaaaggaacacgagtgaattgtgtggcattttatccaaacaacattttgtctttttctgattaaaaaaaaaaaaatctggccagacaggatggctcacgcctgtaatcccagcactttaggaggcagagacgggtggatcacctgaggtcagttcgagaccagcttggcaaaaccctgtctctaccaaaaatacaaaaattagcccggcgtggtggcagatgcctgtaatcccagctactagggaggctgaggcaggcgaatcacttggacccgggaggcagaggttgcagcaagctgagattgtgccattgcacgccagcctgggcgacagagcgagcctggacgacagagcgagactccatgtcaaaaaaaataaaataaaaacaaaaaatcctattccccttctgtagaaaacttggatgggacagcaaaacataaagaaaaaagccagaaatccccgaaatcctactcctcggaaatagcgacggggctcacatttagcagtacatctcaatccgttctaggagaagggcacttggggtgtgacatgcctggttttgaattctggctctgctactgcctaactgtgggttcttgggtgagtcactttgcctccaaaggcatcagttwcctcatctgttaggtgagattatacagactggcctagcagggaagcagtgaggatggcattaaatcaagcactaatccagggtctggcataaaataggcattcaaacattcctttagggctttacagtgcacacctgaggtttagagacagttcccccccacaccctcytgagccttgtccttcctggaatttttggccttcttgagarcttccttgattttcttatgacagccatgaagccacagtggcttttggggatccattatttctcagaaggtgcttggagcggcagaaggttctaccagcctcyaaccatctctgattgccccttctcttccctcctgmccttcaagccagagaatctgctgtactacagcctggatgaagactccaaaatcatgatctccgactttggcctctccaagatggaggacccgggcagtgtgctctccaccgcctgtggaactccgggatacgtgggtgcggagggccctgggctggggctgtgatggtggggggaaccaggagttgaagggcagagatttgtcaccaccacgtcctcttccctccacagcccctgaagtcctggcccagaagccctacagcaaggctgtggattgctggtccataggtgtcatcgcctacatcttgtaagtggggcttggccayggtaggctgtggctccagagttgtcctctcgcctactttcctctcttccttcctctgctctccctctgccctcccttccttccctccctcccttccttccaccaatcaattaccagtattacttcattcaatagatactatgtttcaagcactgtgccaagcaagcactggggtaaatttagcacagcacaaaccagacaaagtgcctgccctcagggagctgactttctttctagtagggaagacagacaatcaacaagtaaataaatctacaaactgacgtcaggtgataaaaataaatactgtggagaaaaaccaagcaggaatagggagacggggtgatgccatttcagtagggaggtcagggaagggctcgctgtggaggtgatgaccgagtggtgagggagccagacattggaggtgtggggaaagagtggcataggcagaagcaatggcaagtgcaaaggccctgaggagggcaagatggcggcacatwcaaggaacagaaaggataatgtagctagaasaggagtgagcaggcagggctggtagagtttataaagggggaactccttccatggctcctgcctgacccctgagactgccccagtgctccaccccggagccaacggcacccgaaagtggaaatgaggatgagtttctccctgcccaggctctgcggttaccctcccttctatgacgagaatgatgccaaactctttgaacagattttgaaggccgagtacgagtttgactctccttactgggacgacatctctgactctggtatttggggctttgcttttttcccctgggccctgcctctggttcctccctcacctgctttgggggcggtctccctcctgccttccttctgtcggattttccagcaccacacaaagagctgtcttcgagaccagacaccctaccccttcttccttctgcttgggtacttccttctgcttggctcccagagtgagaaactaggcattcatttgttcaatcttcaaacatagtctatttgaaaatacctctcccctattgacaccctaatgtctaaaacaccaccataaacattttcatcctccttttgtgccccctattaagaagcaaacctgtgaagctactatcgtttatcatcagtgtgaatgcactgagattagtcaagaacaacttttttttttttttctttcttttttgagacgcagtctcgctctgttgcccaggctggagtgcagtggcacaatctcggctcactgcaacctctgtctcccgggttcgagcaattctctgcctcagcctcccaagtagctgggattacaggcgcccaccaccatgcccggctaattttttttgtatttttagtagaaacaaggtttcaccatcttggccaggctggtcttgaactcctgacctcgtgatccacctgcattggcctcccaaagtgctgggattacagacatgagccactgtgcccggccatatgtttttcttaagagagaaaggaaagagctggaaggcacggggtgggagggcctgaagaagagcataggttgggtggggtggggcatggactgatttggcctctttgtcttgatgccaggccagacctgagggagtgggtatgctcttggggagtacacaggcagtaccatgctgtcattatctttgcttttgtcttgggggtttagccaaagatttcatccggcacttgatggagaaggacccagagaaaagattcacctgtgagcaggccttgcagcacccatggtgagaattcacacaacctgtgagctggggcgggatttggggccctcaggtctgcttctgccctcataggcaacccaccacataaccccatcctaggattgcaggagatacagctctagataagaatatccaccagtcggtgagtgagcagatcaagaagaactttgccaagagcaagtggaaggtgagtccatatccctagttctggtcccagcctccccaggactcctccccatccctacccaggctcagcttgcacagcacctggcatcacaytgggcacacagtaactgcttagggatccttactgaaggacttcattcattcactctwtcattcaacaaacactcccaacaccttctctattccagagagggtccctcacctccaagtctagaggaagaagtctgtaattcttcaggaggcatctgatccagcctatggggtccgagaaaggtcataaaagtggtgatgacctgacagagctgtcagttaagtaggaattagtgaggcatagcggaataatgtctatagccattccgggaagtgcaagtgctaagcctggccagactggaggggctgaggggactgagaggcaggagcccaatttagagaagcaggtaaggggccaggcctcttagggcctcatatgccacagaggagcaccaacttgatcctgagggcactgaggagccccagaagaatcttaggcaagtatttgctgcatagaaagggctctcagggccaggcatggtggctcacgcctgtaatcccagcactttgggaggccgaggtggttggatcacctgaggtcaggagttcaagaccatcctggccaacatggcaaaaccctgtctctactaaaaataaaagaattagccacacatggtggtgcgtgcctgtaatcccagstacttgggaagctgaggcaggagaattacttgaacctcggagatgggggttgcagtgagctgagatcgcgccactgcactccagcctgggcaacaaagtgagactccacctcaaaaaaaaaagaaagagctctcaggatgcagagaatggcatggagtaaagactgggtgacgcattaggaggctgtggcagagatacaggcaggagatggtaagggtttggaaccacagtagcagcaacagggggcagagaacagtggttgatccaggagtcatttaggaggtgaaactgacaagacatgacgatgcaatggatgttgggggaaagagatgtcaagggctggcccaagactgtggctgggaacagaatggatggtggtggtaccatgactgagatggttatcacagggacagaaacatgttttggggggatggttttagttttagacatggtgaatttgaggggtgtgtgggacacctaggtggagatattgaatagagacacacctgagcaagttacttcagctttctgtgcctcagtttcctcctttgaaaatgataatagtacctacctcaaagactttcatgaagattaaatgaattactacgtaaagtgcttagaacagtgcctgacatacagtgctatagtgtttgctattacatattaatatgaattatagttatgtttctatttatatatatagatacacatacatctaacatatgtgcgtgtgtgtgtgtaaatatataataaagccttgtagaggtttttggggggctttaggggaattaataaaataactcctgaatgaaaataacagaacaattgcaagaatcccactgcgcccctgccccatgacttgactctctcaaaagtcctttctcccctctcccttcaatgccttcaatgccagcaagccttcaatgccacggctgtggtgcggcacatgaggaaactgcagctgggcaccagccaggaggggcaggggcagacggcgagccatggggagctgctgacaccagtggctgggggtraggagcgggctctgcagaagggcatgggtggtccacaaaggtgcacccgggctggagtggagggcctgcccctgyggccacctctgttctgtcttcccatgcagggccggcagctggctgttgctgtcgagactgctgcgtggagccgggcacagaactgtcccccacactgccccaccagctctagggccctggacctcgggtcatgatcctctgcgtgggagggcttggsggcagcctgctccccttccctccctgaaccgggagtttctctgccctgtcccctcctcacctgcytccctaccactcctcactgcattttccatacaaatgtttctattttattgttccttcttgtaataaagggaagataaaaccatccttagcgctgtctccctcaatatcccccaccccatcttgttgtgcaaactgactgcttgatttgggggtgcctggcctttgaggtagtcacagggaggcccctccccaacatgagactgggtggggatggggagagagaagtggggaatggaggggaaggtgcttggggaatttctttgtccagggtgccccatctagccttccggccctttggaaccctttctgcgctttgctggtggctcctgagcatggcgggattggcgcaggtcggcactgaacagcacctgtaggagggtggagtctgtgtggggaggagggtacactggggtcagggctggtgagactagtgacagtgttgggaggtggaagagtccttggggaacagggccgaaggcaatgagaatccactggggttgggacaggggtggctggagagtcctttagggccacctggggcggtggtggaagagtccactgggtctgggctggaggagaggaaacctagggaggacacctaggtacactcaccgcttgggcccagccagcataaggtccccacaggctccggaaaaagtttcctaaatcagaagtgatgagactaagttatctgaccccttctgtgacccatcaacagaagtagggtctgagggagaggtgactaagagagagagaagtttctaccatcccagcccactgccagcccctgcagcccactttcctcacccagttccttgttggtctgggggctcggtcccttcgcctgggacgtggtagggtgccagctgtagtcacgttgggcaatgtgccacatatggacatccacgggcacagcctggggcttgtctagggccatcaggcagatgcagtcagccacctttgacagacacagaatgagcccttgtggaagaagggcagcatgtggccagcatcttgcttatagccccaaagccggctgctttctccttcactctggggttactgttgttctatattctcaatcaacagatactatctatgaatacactttttttttgtttgtttttgagatggagtctcgctctgttgcctaggctggagtgcactggtgcaatcctggctctcccaggttcaagcaattctcctacctcagcctcccaagtagctgggattacaggcatgtgccaccacgtgtggctaatttttgtgtttttagtagagatggggtttcaccatgttggccagcctggtctcgaactcctgacctcaagtgatctgtccaccttggcctcccaaagtgctgggattacaggcgtgagccaccatgcgcggcctatgaatacactgaaattgctgtaataagaggtgctactagctgaacacctatgtgggccaggttatcataacctgggaagaaggtattaccacacccactttacagacaagaaaactgaggctttgaaaggtgaagtgacctggccaaagtcacatggctgagaataggcagaaccaagatttaatgttaggctgtagtccaaagcccatcaaaaaaaaatctttaagcaaaaattcattttttaaactacagagaagtataaagaaaaaaaaaggctgggtgcagtggctcacgcctgtaatcccagcactttgggaggctgaggcaggtggatctcgaggtcagattgagaccatcctggcccaacatggtgaaaccccatctctactaaaaatacaaaaattagctgggtgtggtggcgcatgcctgtaatcccagctaatctggaggctgaggcaggagaatagcttgaagccgggaggcggaggttgcagtgagccgagattgcaccactgcactccagcctggcaacaaagcaagactccacctcaaaaaaaaaaaaaaaaagacaaatgcctaatttccagtcatcttattgccagttaaccctattgacatcaagcaaaaagttttgtcagtacatgtcattttacgaaaggaacaaaatgtggccgggagcagtggctcatccctgtaattccagcactttgggagggcaaagcaggaacactgcttgagggcaagagtttaagaccagcctaggcaacattgttaagagcctatttctaccaaaacaaacaaacaaacaaaaaaccgaaaagaagaaatatcttcccatttgtctcccccaaggaaactattatttagtttcctgcaatttccttctggaaattgctgcatatatatagcagcatatatgtgttgcatctgaacaaatggtctttctagaaattcattcaaagggctatatcctttctactctttctgcactctgcttttttctctcataaaacatctacttatatcctttctccttcctgctctgcctccggaagccaagcctccacccagctcccaggcttggctcatttcctgctctcctcttagtgtcagtagagagggcagctcctaccccctggggcctcaccttggtgcccactccaggcaggatgcagagggccttgtgggcctcctcatatgaggactctcgtagctgctgcagccaggctagcccgccctgttcttccaggatggctcgggcactggcactcacgtaacgggcacgatagcccaggcccagcttcctgagatgagcctccacctctggccctgcggggagtgaggaggagggcaagcatcaggcatcttcaagttcttcctgtccttaggctagtaagtgagctctctacctcacaagagtgcttttcctaagttcccctcctacctccccaccctctatgggatagtggacacttttatgtgcaagggaaagggttaggcctgggtcctgtccctctacacatgttttctgagcacctgctatgaattggccccggagcccaagtctagtccagggactgaggacttgcttcccttgaggagctccccaactgagttccttaacctttccgaaagagtgttcacactcatgatctaaaaaaataaccacaatatagcaacagcttctatgatcaagtgctaggcaacatgcttcagatatattatcatgcttacttttcccaagaaccccactgacagtactgctgttttcccattttacatgtggagaaaatgagggcttagaagaggttaacttacttaagaaaggacatgggggagataagatcttgcacctaggtctgggacaccaagacctgtgctttttctttttttgacacagggtcttgctctgtcacccaggctggaatgcagtggcacaatctcagttcactacagccttgacctcctaaggctcaagcgatcctcccacctcagcctcctgagtagctgagactacaggcttgtgtcaccatgcctggctaattttgtttattttttgtagagatgaggtctcactatgttgcccaggctggtctcaaactcctgggctcaagccatcctcccaccttgggctcccaaaagtgctgaaattaccagcatgagctaccccacctggctaacgccgtgctcttaacccattacactacactgcctcatgattgctttattcactcccaaagcccttctagatagaaactgttattcccattctacaaacaagctaagagaagccggaagaggtgaatgactttcttgaggccttatgactaactaagccaggagctgagactcaagaacaggtttctttttttttttgttgagacagagtctcactctgtcgcccaggctggagtgcagtggcacgatctcggctcactgcaagcttcgcctcccgggttcacgccattctcctgcctcagcctcccaagtagctgggactacaggcgcccaccaccacacccggctaattttttttgtatttttagtagagacggggtttcaccgtattaggcaggatggtcttgatctcctgacctcgtgatccacccgcctcggcctcccaaaatgctgggattacgggtgtgagccaccacgcccggccaggttttttttttttttttgagacggagtctcgccctgtcgccctgtcgcccaggctggagtgcaatggcatgatctcagctcactgcaacctctgcttcccaggttcaaatgattctcccgcctcagcctcctgagtagctgggattacaggtacctgccaccacgcccagctaatttttagcagagagcgggtttcaccaggttggccagtctggtctcaaactcccgacctcaggtgatccacctgcctcagcctcccaaagtgttgggattacaggtgtgagccaccgtgcctgacccaggtttctttttgtttgttttgagatggagtctcgctctgtaacccaggctggagtgctgtggtctgatcttggttcactggagcctcctgctcccgggttcaagcaattctcctgcctcaccctccggagtagctgggacaggtgcctgccatcacgcctgactaattttcgtatttttagtagagatggggtttcaccatgttggccaggctggtcttgaactcctgacctcagatgatctgcctgcctcgacctcccaaagtgttgggattacaggcgtgagccaccacgcccggccaggaatgggtttctaagcaccaaaaacattctcctgttttgaggcagtctgtctctttgctatgcagttcccaagcacttgtcctagcttggttctcacatctgccaatcgatacacttgcctctgtaaaacatttgccttacagggctactgtgaagaacacacgtgttcttagatacaaaactatcccattcactacaatgataccagcttgaatttttttttttttttttttttttgagacagagtctcgctctgttgcccaggctggagacggggtttcactgtgttagccaggtgtgagccactgcgcctggctgataccagcttgaattttacatatacttcctgtgtgccaaacactgtgctaggtgcagtatgtatattcctttcttcaaccctcatgacaactccaataatagcataggtaggtgctattattattctacttcacagatgaagaaactttagtacagagatgctaaataatgtgcccaagtgagagttggggttcagaaccaggcatgggtctgtccccagaatgcatgctcttaaccccaaactactgtacattgtatacagatatttttctgattaggcattgaacccattgggcaaaaagcacagaccagtgaggtgctgacattttagggatgcatagggaggatgagtaactggagttgatcagaccaggcagggcggttctggataggggaagtgtttgggaaggcaggaagccttgagaaggtaaccaggggagaaatgaacagatcttgaaagctgatggaaggcctgggggcaggggacccacctactcaccagccagggcctgcaggctggggaagccatggtaggtgacatcatcaagctggatgagccgaggtccaaaagcctggcacagccgctccaccatgccagtgatgcgggcgatgttgttgttggaggaacagataaaagagaaaaggcattcgatggggtcttgtcgcagcagtcgcacacctggagaccagaaatgcagggggtaggagaggtacctgctgttgggtgtggcctcttcccacccacaggtcagatcctaggtaccaaaactccaggaggatcccaggagaatgagagtcagcaccgttagagaaagcaacaccagacctctcattcctcatagcatcttgtgagggctgagttaccatcccattccacagataaagaggccacaatgtaagctccatgaggactggcatttgggtctgttttgttcactggtgtatccccggtcacacagcagatgctttgtatatatttacagaatgaatgaaatcacttgccctaggtcacacaaccaggaatgggctcaaaatccttgtcacttcactatggtgattagcaggataataataatggtaataatacttactatgtgcctggcatt

SEQ ID NO: 97672 - DNA, 13736 bp, Homo sapiens
tgatgtatgtgtccatccttttgccaatattactttaccctgattatctatctttgtagtaagacttgaaatcaggtactatgagtcctccaactttgtttgtttgtttgtttttgttgtttgtttgtttttagctcacttcagtctctaactcttgggctcaagcaattctctcacctcagcctctctagtagctagggccacaggtgtgcactatcacacccagctaattttcttttgttttcctcactgcaatctccacctcccaggttcaagcgattctcctgcctcagcctcctgagtagctgggactacaggtgcataccaccacatctggctaattttttgtatttttagtagagacagagtttctctgtgttggccaggatggtctcgatctcctgacattgtgatctgcccgccttggcctcccaaagtgctgggattacaggcgtgagccaccgcacccagcctccagctaatttgaaaaatgtttttctggagatggggtgtctctatgttacccaggctggtcttgaactcctggccacaagtgatgcatcttggctcccaaagtgctcagattacaggcatgagccaccgcacctagacttcttcttctttttcaaaattgttttgaccattctagttccttttcttttccacgtaattcttagaatcagcttgtagactaccaaaatattgctagaactttaaaaccaattgcactgaatgtacagatcaatttaagacaccttaataatattgagtcttcttatccatgaacatgatatatcttgtcgtttgttttagtctcctttgatttttctcatcagggttttgtagttttctgtgtaaatctgctgcacacattttgttagatttatacctatttcacatcttttggtgttatcataaaggatacttttttttttaaacaaagtttcactctgtcacccaggctggagtgcaatggcactgagacagccagatgggaaggggtccccagagaaacttcaaccagcctgtgcactgggaggagtgcacattgggatggagacacagaagttcctgctgtttgcagtggggaggagcctggcccctcctttacctgggtggaacctgcaattcaatccatgaggcaggaagcacatactaacagtactttcactctgctgagagtccctgtttccctctgtttcccatttggcccaataaatcccatttttctcattcttcaaattgtctgcaagcctagattctcatggccatgtgacaaggactccatctttagctgaactaaggaaaagcccagcaacagcaccatcacagctcactgcagcctcaacctcctggggctcaagtggtcctcccagctaagcctccaagtagctaggactacaggcatgcaccaccacacccagatattttttgtatttttttctgtagagactgagttttcccatgttgcccaggctggtcttgaactcctagggtcaagcaatccacccacctcagcctcccaaagtgccaggattacaggcatgagccactgcaactggcaatggtactttacatttcaatggtacttcacattacaatggtttttttgtttgtttgttttttgtttttgtttttgtttttgagacagagtctcgctctgttgcccaggctggagtgcagtggcacactccacctcccgggttcatgccattctcctgcctcagcctcccgaatagctgggactacaggcgcccgccaccatgtccggctaattttttgtatttttagtagagatggggttcaccgtgttagccaggatggtctcgatctcccgacctcgtgatccacccacctcggcctcccaaaatgctgggattgggattacaggcgtgagccactgcgcctggccacaatgatttttacatttcttcgtctttttttttttttttttttgagacagagtcttgctctgttgcccaggctggagtgcagtggcacgatctcggctcactgcgatctctgctcactgtgacttccacctcccaggttcaagtgattctcctgcctcagcctcccgagtagctggaactacaggctcacgccactatacccagctaatttttttgtatgtttagtagagacaaggtttcaccatgttggccaggctggtctcgaactcccaacctcatgatccacccacctcggcctcccaaagtgctaggactacaggcatgagccaccatacccagacggtttttaacatttcaagttccaactttctttttcttttctttttttttttttttttttttttgagacagtctcactctgttgcccaggctggagtgcagtggcgtgacctcagctcactgcaaactctgcttcccaggttcacaccattctcctgcctcagcctccctagtagctgggactacaggcgcccaccaccacgcccagctaatttttttgtatttttagtagagacagggtttcaccatgttagccaagatggtctccatctcctgacctcatgatctgcctgtcttggcctcccaaagtgctgggattgcaggcgtgagccaccactccttgccccaattttcactgtacagaattaaaattggttttttattgaccacatatcctgtgaccttgctaagttgcttattacttatagtaggacatttttgtagattctttgagattttctatatagacgattatgtaatctgttagtatagttttatttcttccttttcaatctatatgcttttttataatcttaatgtaatgttccattacaatgttgaataggagtgacaaggacagatatccttaccttgttctctttctcagtggaaaagcactgagtctcttaccattaaatatgatattagatgtaggtattttactgatatcaattatcaggttgaggatattctcttctgttactagtatactgacagtttttatcataaatgatgttagacttccttttcttttctttttcttttttagacggagtctcgctccgtcaccaggctggagtgcagtggcgcaatctcggctcactgcaacctccacctcccgggttcaagtgattctcctgcctcagcctcctgagtagctgggattacaggtgctcgccaccatacctggctattttttttttgtatttttagtagagacggggtttcaccaagttggccagtatggtctcgatctcttgacctcgtgatccacccacctcagcctcccgaagtgctgggattacaggtgtgagccactgcgcctgacctagactttcttttcaaatgcctttcttgtgggtgcattttttgagatcatcatatggttttgtaacagcccaagaggttcttcttgcccactgcccagaaaagccaatgcactgagaacagcaggttttgcagcaaagaacatgtttaattgcaaggccagccaagcgagaagatgagacaattctcaaatctgcctcccagagaatgcggaggctagggttttaaggatagtttggcaggcagggagctagggaatgggaaatactgattggtttggtcagggatgaaaccacagggttatcaaaactgtctctgtgcctctgtcagttcctgggtgggggtcacaagtctgggtggcatcagttgttccaccagaatgcaatgcctgaaaaatatcacaaataccaatgttaggttttacaatagtgatgttacctataggggcaactagagaaattataaatctcgtgaccactagctgtatgaattctgagcagtaagcaaattagaaaacaatggctagttattattaaactctgcataggtcgtcgcagaattcaggacccacctataattctaatcttatggcctttcataagttttacaaaggcaatgtcagtacccaaacaaggagagggtaatttgggaagggactgctatcatccttgctttaaggttaaattattaactaaattcctcccaggagttcctgcccaggaattggcaagggcagttagcttatgagtttacaaggaagttggagcctgctatattaaatttctctgtgtctttttgggaaagggctattaccaattttgtttcagagtcaaatcatgaactgaattccttcccaaagttagtttggcatccacccaagaatgtacaaggacagcttgaaggtcagaagcaagatggagtcagttagatctgatctctttcactgccataatttcctcagttataatttttgcaaaggcggttttgtaaccgcccaaggggttgacctgaccttgcccgctgcctagacagagcagattcgtcaagacagggcaattgcaatagagaaagactaattcactcagagccggctgtgtgggagaccagagttttattattactcaaatcagcctctctgagcatttgagcattcagggagcagaatttttaaggataacttggtggaagaggggaagccaatcaggagtgctgattggtcagagatgaaatcatagggagtagaagccgtcttcttacgcagtcagttactgggttggggaggaggggcacgagatcagatgagccagttcattgatctgggtggggccagctgatccatcatgtgcaggctctgcaaaatcaagcactgatcttaggagcagttcagggagggtcagaatcttataacctccagctgcatgacccttaaaccataatttccaatcttgtggctactgttagtcctacaaaggcaatatagtctccaggcgagaaggaggtctgctttgggaaaaggctgttaccatctttgtttaaactacaaactataaacttaagtttctcctgggcaggcgcggtggctcacgcctgtaatctcagcactttgggaggccgaggcgggcggatcacgaggtcaggagatccagaccatggtgaaatcccgtctctactagaaacacaaaaaattagccgggcttggtggcgggcgcctgtagtcccagctactctagtctcctgcctcgggaggctgaggcaggagaatggcgtaaacccgggaggcggagcttgcagtgagccgagatcgcgccactgcactccagcctgggcgacagagcgagcaacgatccgtctcaaaaaaaaaaaaaaaaaaaagtttctcccaaagttagttcagcctacgtccaggaatgaacacggacagcttggaggttagcagcaagatggagtcagttaagttagatctctttcactgtctcagtcataattttgcaaaggtggtttcagtttcaatgatattttgttgtagcagcaggaacaagttaagaattattatcctctttattattggtctcaaaatcccaggctcaagcaatcctcccacctggggcctcccaaagtgttgggactacaggtgtgagccactgcagggcctacggttcttatatattgctaaattcactttgtgatatgaaggatattggttaataaaggatatattgttctataggttctctctccacccaccttgtaatgtcttagactggctttagcatcagggtaagtcaaatataaattaaaatgagttgggaagtatccctcctccttcatgttctgggagagttggtgtaggattgagattatttcttctctaaatatgtgaatcagggcttctgttggggccggggggcgggggcgctggggcgctgggcggtggaatgaaggtcacgtgcccgacgggcgccagctggctagatgcctggcaaggaggcggcggcgtgctccactgcccgcccgacctgcctgcccttcgccgcccgagagtgcgcggcgcgctcaacgtcaccttcgactcggtggcgccacggcgggcccggggcaaagcgccgggctgcggcagaagggcggcagcggcggcggccgcgatggatctaggctagggcagtcgccacccgcccaagctgcgagccccatactcgactcctgctcgcctgcctgccagcctgcccgtggcccgcgggtctccttcctcaaagggggaccttctactcagaatatcccgagtgctgcgtggaagtaaaactattccacaagatcgacagtgggagagccggcctggcacattggctcagacctgtaatctcagcactttgagaggccgaggcgggcggatcacctgaggtcagaggtcgagaccagcctggccaacgtggtgaaaccccctctctactaaaactacaaaaattagccgggcgtggtggagggtgcctgtaatcccagctactcaggaggctgaggcagaagaatcgcttcaaccctggaggcgcgggttgcagtgagccgagattgcaccattgcgctccagcctggatgagagagccagactcagtctcaaaaaaaaaggaagtaggagagccggcccagcgcgttggctcacgcctgtgatcccagcactttgggaggctgaggagggaggatagcttgagcccaggagtttgaaaccaacccgggcaacatagagagatcctgtctctacaaaaaatagaaaatttagccaggtgtggtagagtgcgctggtgggcccagctactcgggaggttgaaacggggacatcacttgagcccaggggttcaaggctgcaggaagccatgatcgggccactgcactccagcctgggcaacagagtgagacattgtctcaaaaaagaaggaaagaagtgaccctcatcagccagtctggaaaaccagtgctgtacatcagctatgggccagcttatgaccagggtggcccagttgaaattttccctccctctactttggcagggtcaaccatgcatccaagggagagttcctccccaacctgcatatcacaggtctccaggccaacctccaagacccaaaggacccatcttcactacaaatggatccccatggaagacagccatatggctgacactaactcccactttcaagaatagacaggccgggcaccatggctcatgcctataatcccagcagtttgggagtccgagccgggctgatcacttgaggtcaagagttcgagaccagcctggccaagtagtgaaacctcatctctacaaaagtacaaaaattagccagctgtggtggtgagtgcctgtaatcccagctactggggaggctgaggcmcaagaatcacttgaacccgggaggcagagactgcaatcacggcactgcactccagcctggggaacaagagtaaaactccgtctcaaaaaaaaaaaaaaaaaaaaaaaaaaawtatatatatatatatatatatatgcaatggacttcattggctgtgtcaggggaaaaggaggcaaggtcctggtccactgtgaggctggaatctcccattcacccaccagctgcaagtcttcccccatgaagaccagacagctctgcctgaaggagaccttcaattacatcaagcagaggaggagcatgatctggtccaattttggcttcatggaccagctcctacagaaggaatctgagatcccaccctccacgcccacccccagcctccctcttgccaagcgaggcagcaggctcttcactgaaggtcatttgcagatactgagcccaggcctgcaggatgcctactgcacattcccttccccggtgctggcactggtgcccacccaccggacagtctaagagttcagcaggatccctgtggccacagccacatcctgctaaaactgggatggaggaaccagcccaaccccaagagcaactgtgacttttgtttctaagactcgtggacacttcatcccagtgcaatactgaagacctcactctgtcacactgccccagtgagatagtgagtgctcaccaggcttgcaaatgaacttcaggctgacctcagggtaggttctcaaaacaccaaaggagggccaagccattatgggagcacagcatgtgctgactactgtgcatccagaccccctgccctctcaggactgcccagtccttgcacctcaaagttcgccttttcatttaaagcgtaaggcaataaataccctgcagcagcatgggagaaataagttgctggacaaggagaaaaggcagttgggaaaccaattcatttggaaggaagcacaatttccaccttcttttctgaactttggcagtctcactgtctgtctctgttgcttcagggcataagctgatcaccatgtagccaggaaggtaaccctgcagggtttgtaggggcatgatatatgcactgatttaaaccctgacatgtttttaagattctttcttgggtccaatggaggcagttggttaaagtagcaaggcgttggctttcctgggtttctttttcatcatgggttattccctgacctttgagtttggcatgattctttatttatttatttatttattttgagacggagtttcgctcttgttgcccaggctggagtgcaatggtgcaatctcggctcaccacaacctccacctcccgggttcaagcgattctcccagcctctcgagtagctgggactacaggcatgcaccaccaagcccactaattttgtatttttagtagagacggggattctccatgttggtcaggctggtttcaaactcccaacctcaggtgatccgcccgcctcggcctcccaaagtgctgggattacaggcatgagccaccatgcccggcctggcatgattcttattcatactttacaacacgtctcattacacctcttctcttctctttaccccttttctcaaatgaagcaactctttgggaaaagtgtttttcagatcataaacaaaaaacttatacctttcaggcggcggcagtgggtgccaggagggagggggtacctgctgtgtgttctaggtcagtggtgttgaacacaatggtttcctcagcttgctgtcctatatgcttggtctcttactacagttgtttccctccctgaccctgagggttgtcttcaaactactcatttctgggatttgtagattttgcaatgtggtactacttttttttttttgtctgtgggttatttctgcaggggaaaaggcaataattttctaaaacccatatgaatgtgaggaaaagaagtatgtgactggttgttggtttttttttttatggtgcaaaaaaatagtaaaaggaaataaacaaatatctgaaccaatttagcagtgaagctatctagccctgcagtttattttgtttgaatttttttttttttgagatggattctcgctctgtcccccaggctggagtgcagtggcgcaatctcggctcactgcaagctccgcctcccgggttcatgccattctcctgcctcagcctcccgaatagctaggactacaggcgcctgccaccacgcccacctaattttttctatttttagtagaaatggagtttcaccgtgttagccaggatggtctcgatctcctgacctcgtgatctgcccactttggcctcccaaagtgctgggattacaggcgtgagccaccacgcccaaccctatttagttagaatttttaaaactagaaatccaatttctggctgggcacagtaacttatgcctgtaatacaagcactttgggaggctgaggcaggtggatcacttgagcccagtaattcaagatcagcctgggcaacatggggaaagcccatctctacaaaaaacacaaaaattagccaggtatgatggcacatgcctgtaatcccagctactcaggaggctgaggtgggaggatcatctcagcccagggaggttgagactgcagtaagcctctgcactccagcctgggagacagagtgagacctccatctcaacaacaaaaaatccaatttcttttacagatattggacaattcaggttatctcttcttaaatgagcttggcagtttgtgtcttttaaggaatttgtctgctttatctaagttgtcaagtttacagccatatgtttcttggtaatattcccttattttccttttaatgcttttaggatgtgtaggggtgtcccctttttggttctttatcttttaaaaaatttagattatatcacatagcaaaatcaacaatttaaagtgtacaattcaggggtattcagcatgtaatcgcccaatgatttcttcctgcctgctgcacagacaaaaccaattcactgagaccctggtattgcagtagagaaagagattaattaatgcaagacagctgagcaaaaggactaaagttatcactcaaatcagtcttccagagaactcagaagctaggatttttatggataatttggcaggcgggggctagggaatgggtgctgctgactggttggggataaaatcatagggatgtggaaaacagtccccatgtgctgagtctgcctctggtgggtgggtccataggaccaactgagtcatgagtcacaggtctagatggggtcagttagttgccagaatataaaaatctgaaaaacatctcaaaagaccaatcttaggttctataatagtgatgttatctataagcacaactggggaagtcacaaatcctgtgaggctagacgtgagatggagttagccatgctaggcttctctcactgtcatagtcattgcacatgcaatttcaatcacatacaaaatgtgcaaccaccacctaaatctagttccaaagtattttcatcaccaccctcccaaaaacccatacctattaaacagtcaatcctcatttctttctccccccaggattagcaacttaaaaattttctttctgtttctatggatttacgtattctagatatttcttataaattatktcatacaacttatggcatttgtgtctgctcactgaagcctaaacctcccagggccaagcgatcctcccacctcagcctcctgagtagcttggactacaggcatgtaccaccatgcctgcctagctaatttttataatttttagtagtgacaagctctcactatgttgccagggctgaattctataagttaaaatgtatttttttcagggatggggtcttgctatgttggccaggctggtctcaaactcctgggctcaagcgatcctcctgccatggccttccaaagcactggtattacagacatgagccaccacacctggctagatttacaaaatatttattaattttttattctcatattctactcatcacttgggtttaaattttcttctttcttaattttgaagtatgtctttcagcaaggacctttaaatagttaaccctcttggcttcttctcctccctcattctttttattctttccttctagagctcctattatatgcataatggaccttcttattcagttcttcacatctcctaactactaactctgttctatatctctctaggctacattctagataattcgttcagacccatcttcaaattgattattgtttcctttacctatagttcttaaaatttatttttaaatatagagatggggccaggagcagtggctcatgccggtaatcccagcattttgggaggccgagacaggcagatcacctgaggtcaggagttagaccaggctggccgacatggtgagaccctgtctctactaaaaataccaaaaaaaatgctgagcgcagtggctcacgcctgtaatcccagtactttgggaggctgaggcaggtggatcacctgaggttgggagtttgagaccagcccaaccaacatggagaaaccccatctctactaaaaatgcaaaattagctgtgtgtggtggtgcatgcctgtaatcccaactactcgggagcctgagacaggagaatcgcttgaacccaggaggcggaggtcgcagtgagccgagatcatgccattgcactccagcctgggcaacaagagcgaaactccgtctttaaaaaaaaaaagaaaaaacaattggccagatatggtggtatatgcctgtaatcccagctactcgggagactaaggcaggagaatcacttgaacccaggaggcagagattgcagtgagccgagatcttgccactgcactccaacctgggcaacagagtgagacgccatctcaaaaaataaataaatacatacatacatacatacatacataaaataaaaatagagatgagatctcactctgtggcccaggctagtctcaaaatcatgggcgcaagtgattctcccacctcagcctcccaaagtgctgggattacaggcgtgagccaccatgcttggccttcatcagctacatttagtctgtataactcattcggtgaacttttgttttcattgttctattgacttttttttttgagacaagagtttcgctctgtcacccaggctgcagtacaatggtgcaatctcagctcactacaacctccccctcccagattcaagccattctcctgcctcagcctcccaaatatctggaattacaggcatgtgctaccatgcccgattaatttttgtatttttagtagagacagggtttcaacatgtcagcaaggctggtctcaaactcctgacctcaggtgacccacccgcctcagcctcccaaagtgctgggattacaggcatgcaccrccatgtccgggtatgttaattattttatttatttattttattataaagacggggtctcactgtgttgcccagtctggagtgcagtggctattcacagacacaatcataacacactgttgcctcaaactcctgggctccagtgatcctcctccctcagcctcctgagtggctgggactacaagtgtacagcatcatgcctaggtcaatgaaattttacttcagtgattacattttttcacttgtagaatttctacagttgacctttgaacaagacaaatttgaactgtgtgagtccacttatatgtggattttcttctgcctctgccacttctgagacatcaagaccaatccttcttcttcctcctcctccttagccttctcaataaaaaaacaacaaggatgaggctgggtgcggtggctcacgcctgtaatctcagcactttgggaggccgaggcgggcagatcacgaggtcaggagatctagaccatcctggctaacacagctaaaccccttctctactaaaaatacgaagaattagcagggcatgttggcagctgcctgtaatcccagttactcgggaggctgaggcaggagaatggctttaacctgggaggcggagcttgcagtgagccgagatggcgccactgcactccagcctgggggacagagcgagactctgtctcaaaaaaaaaaaaaggatgaagatctttatgatgattgtattagtccgttttcacactgctggtaaagacatagccaggactgagttatttatttatttagagatggggtatcactctgttgcccaggctggagtgcagtggcaggatctcggttcactgcaacctctgcctctggggttcaagaaattctctgcctcagcctcctgagtagttgggattacaggcgcctgcctccatgctcggctaatttttgtatttttagtagacacgaggtttcaccatcttggccaggctggtcttgaactcctgacctcgtgatccacccgcctcagcctcccaaagtgctgggattatgggtgtgagccaccgcgcccagccaggactggggtaatttataaagaaaaagaggtttaggccaggcgcagtggctcacgcctgtaatcccagcactttgggaggc

SEQ ID NO: 97673 - DNA, 22542 bp, Homo sapiens
aatactttggtgagtccggtggagggctgcagggccaggccaggctggggctccacatcccaggtcagtctccgtctcagttgaggctgcgagaaaaaatagttttaggccgggcacggtggctcaagcctgtaatcccagcactttgggaggccgaggcaggtggatcacctgaggtcagaagttcggagaccagcctggccaacatgatgtaaccccgtctcttctaaaaatacagaaaactggccgggtgcggtggctcccgcctgtaatcccagcactttgggaggccgaggcggggggatcacgaggtcaggagatcgagaccatcctggctaacacggtgaaaccccgtctctactaaaaatacaaaaaattagccaggcgtggtggcgggtgcctgtagtcccagctagtcaggaggctgaggagattgtgccactgcactccagcctgggcaacaagagtgaaactccatctcaaataagaaaaatacagttttagcaggtttgtccactgaggagcctgggctggccggtgatgaaagcgaaccagaggggaccctgctctcagccggtttatgactggctctggaccaaccaatgtaggatggtcgaagcaagagatgtaaaaccacccaggcccagtggttcatgcctgtaatctcagcactttgggagactgaagtgggagaatcgcttaagcccaggagtttgagactagccttggcaacatagtgagaccctgtctctacaaaaaataaaaagaaactgaccaggcgaggctgggtgcggtggctcacacctgtaatcctagcactttggaaggccggggtgggagggtctcttgagcccaggagtttgagaccagcctgggcaacatagtgaaatcccatactacaaaaaattagctggttgtagtggtgcacacctgtagtcccagctactcgggaggctgaagcaagaggaccgcttcagccggggaagtcaaggctgcagtgagccaagatcatgccactgcacttcagcctgagcaacaagagtgagaccctgtgccaaaaaaacccctcaaaaaaccatgttgggagggctgatcagattaggggaggaaggtcatttgtgcaggaaaaaaagcagttctaagcctcactggtttccagtggtggccagatttgaactcagcttgcctttggccctgaccccagctcaacccatgggtggtgggtcagagggagggcctctgtccccaggcagtgcttttgggggttcctccagcttctagtcctttcttgcggcccctgttttgttcttctctagcagttgcccgccatgttgggcccagggccagtcctgtgggtctgtttgcacactcaggacacagacttggatgtttgtggagctcctggttcacagggggctctggacttgaccaggggagtccctgaggctgtgcagccctttggggtctcacgccttccccccgccccattcccccagtgagcagcggttccatcgcagtgaacgccgactcttcggtgcagttgttggccgaagaggccgtgacgctggacatgttggacctgggggtgagtgtcagaggggacctgaggctcagcaggttggagctgtccaggctgcgggggagggagcgctgggggaccaggagccgggctggggtcgctgctggcccctcaccgcccctcaaccccttgcaggcagccaaggcaaacttggagaaggcccaggcggagctggtggggacagctgacgaggccacgcgggcagagatccagatccgaatcgaggccaacgaggccctggtgaaggccctggagtaggcggtgcgtacccggtgtcccgaggcccggccaggggctgggcagggatgccaggtgggcccagccagctcctggggtcccggccacctggggaagccgcgcctgccaaggaggccaccagagggcagtgcaggcttctgcctgggccccaggccctgcctgtgttgaaagctctggggactgggccagggaagctcctcctcagctttgagctgtggctgccacccatggggctctccttccgcctctcaagatccccccagcctgacgggccgcttaccatcccctctgccctgcagagccagccgccaaggttgacctcagcttcggagccacctctggatgaactgcccccagcccccgccccattaaagacccggaagcctgactgtgtgctcggctcttgttcctccacctggcccggtgaagccgggagcgtcctgggcccctgctcacgtcctccatgtcccttgcaaatagggcctttgagctcccctggactatgtcccttagggcacctggaggtccgtaggaagcaggctcgagggggtgggtggggtgcagccaggcgggcaggctgctgaccttcaccctacaacggtggggagggtgaaggtcaccagtgatggggacatcggtcagggaggggtgtccctgctgctcctggcgcctctgccgagttcctggtctccaggccttgaccctgagccctgctggcccttggccctgcccaccagcctctggaaagaggcgggccccacccgctcccacgctggccccgccctgtgccagccggtcctgtgggtggccctgcctggccgggtgccgaatctgcagtgtttttggcacctccgtgggcacctaggcttctgggttggccccagatggagtggggtgggcccaggagggggcggctccctggcactgccccgttgggcctgcctcttctcctttccataaccctgggggcgggcaacactggctccagctggtgtgtggacggcgggggctggggtctcctgacctcctcccttccttgggacagggccctgtgcagtggggtaggcagggaattccaggggggtgagtggggagggtgggcctgcctgtgtcactggagctgggatggtgacagagaggccgccccgggcctgtcagcacggacgggcagctcactcccacgtcatggcactatgcgggtgacttgccacagcttcacttgaggcgaggtgccgttgggggccttgcgactctgaggccgccggtcagcagatcaggtattctggaacagcccacggtcccctgcctggctccccctccacttgggcctcgggacacgagtgaccaggcccccacttctccaggaatccgcagcccagggaaggttgtgtcagccaccaggccacaggagcagcctctgcccaggccccccctcccccccgcccccagttccagccccaggtcttcaagttcctgccaggccaccaggaccctataaataagaccaagggcacagctgggacttagcaggggcccagcgggaggagctgctcactccggggacctcccctgcccccaccaccagggagggtgtgaaccttggagccaggcctcaggacacccgagacacctgacactcggagggaacagcccgtgctggctggatgcgtcctggagcaggaggcagtcagggtggggccgggaaccaggcggtcaaggcccttcagtgagggcagcccctggcttagtgaggcagaacagagcacagggtttgtccccatcacacccaggaacaacccactcaaccatggggacgccgagtatgggaaatggtggggaagcgttttagcatgtttattcatttagactggctctgggcatctggtccccaaagggccacacagtggcccctgtgaagcccagcaagttccgacaacccgtgtcccattccactcccgaccagactgaggtgatggtgtccattccactcccgaccagactgaggtgacggtgtccattccactcccgaccagactgaggtgacggtgtccattccactcccgaccagactgaggtgacggtgtgcaggtggcagagccacacacgagaggcaagaggcagggagggaggtgggggctgctggccactcacagggggccccagtgtcctgcttgggctgctcatttggcaccagtccacggctccctccgccacctttgttctcactggaagcagaatgagcctggccctgtagttcccacctggggccccagcccttcatccaagccccattcatcgaccctgcccctcctccctccaactgggtccagttcactaagctcccagaactgctcaagccattcccacttcctggaccatcgtcttttttttttttttttttttttttttttgagaggagtttcgctcttattgcccaggctggagtgcaatggcacaatctcagctcaccacaatctccgtctcccgggttcgagcaatgctcccgcctcagcctcccaagtagctgagattacaggcgcacatcaccacgcctggctaatttttgtgtttttagtacagacagggtttcaccatgttgatcaggctggtctcgaactcctgacctcgtgatccgcccgcctcggcctcccaaagtgccaggattacaggcatgagccaccgcgcccggcctttttttttttttttttttttttgagacggaatctcgttttgtcgctcaggctggagtgccctggcacgatctgggtttattgtaacctccgcctcccgcgttcaagcgattctcctgcctcagcctcctgagtagctgggactacagacacatgccaccatgcccagctaatttttgtatttttagtagagacagggtttcaccatgttggccaggctggtctcaatctcttgaccttgtgatccgcccgcctcggcctcccaaagtgctgggattacaggcgtgagccaccgcgcccgaccgcatcatcttttttatgtgacaaactcctagtcattcctcaaaccgcagcccctgtgacccccttccaagggttatcccagcctctccctctctggcctagccctgacccttcggggctgggtgtgcctgtcaaggtgggggccacggctgccgggagcatgggtggcagccggaaggagacctggggaggagcgcagccctgggaggggcgcccatggccagggtgggggtggaggtggtcaggccagataaagggaggggccagatgagtggacaggaggtgctcccgtaggaatggggtccccttctctaaatagaggggcaggacggggcccacctcaaccaggaccatcctcaaaaagccgacggggaagggtgagatgcacaccacattcgtgtctcattggctgtggcctcagtttcttcatctgtaaaatggggtaatgcccaccccaaaggctgggaaccagtgcatgtcctgcattaatggggggtgatggccccaaagtgatcctgccgcatcccctcaccacactcccacccaccctggagaaactgaggcttggagaggccagttacctcccggggtcacagcatagccggctggtgactggctgggcacaaggcaggcctggcactggctaatcgctccataaatgccctctgaggtcaccattgacagatgcaggaggccagggctggccagggcacccccactctacggcaggtgactccagcctgttttcctggacgacagccgctgactcaggcccctcttcccgtcccccccacgcgggcgcccccaggcggaagcaccgggcctggggcgacaggaagggggcggggcagcgagtcgcgctgtacaccccaaaaccctgtcccgctgacgattcggggtgcatctcagcccgcggcgaggcgggccgagacccttggctcggggcattcaaggggagtccccccatgaactgcgccaagcctgggtcccgggtggcccagccgtcaaggcgccccagggccagggccggcaggcaggggcgggggccagtctgcgtcaccgcccgcccggccccccgcccccctgcccgccctaactccaccccgagggaaggcggcgcggataaaggctgagggccgcgcgcttggcccagaccggcccggccagcgcgcattcggccccggacgaaggtactcgcagcacttggagcgcagaaccggccgcgcccggtgagtgtggaggggggggacctgcgggccgaggaagggtgcccactctagatggctcaggatgcccgcacttttctttgttcttgggacaggagggatcggggagcctccggtcctgggaagccccccggggtgcggggtgggaggggctccgcgcagccagcgccgccctggccggacctcagcccccgccccgccccccggggcactcccccttcaccgcgggtgaccttgaactggttgccgttccgccctccgttgcccagccacacggtcccagtctcccgactacagtctttcgttcccgatcggggttcctcccccgcgcgcagcccagtcgtcttcctcccctgccaggggcagcgcggcgccccctccccgggactccgggcggcgctcccaggcgggcccggcagagggcgcgcccgagctgctgactcaccgcatccccgagcgcgcgcgggcgcagccggggacgccgcgtcacgtcacggctcgagcgggcgcgcctcggggaaacgggttctgcccgcggccggcgggtgggcgcgcggggcccccggcggcagccacccggccacgtcaccgaggtgcgggcgccccgccccggccacaactccgcccccacgcaccacgccctccccggggccgcggccctagcctcaccgtcgcccgcccgccccgggaccccggccacgaggcgcggacttcgcgctcccgcttccgctcgcggcttttcccggacgaaggcggcggggtggccccacgacttcctgcccctcccggcgccgggaacaatggcccgcgccccctcccgctcccggccgctcccttgggatcgcgaggggtaccagacccgtctccagacctgggtcccgcgccccccggggcgcgcccgccctttgttgcgggctccgggcgcttatgaatggctgcgggcgcgggcggggcgggggcgggcgcggagaggcgccagccccgcccccgctgcgctccccttggtcgcctgggcgctgggggcggggcgagggggcgggcccggctgccacgtggggcggtgccgcggcggctctcataggcccgggctcgcggccgactgggcgctcggcgcgcggcgattggccggcgcccggccggcggagtaagtagtgaatgggagggggcggcggccccgccccctggaacgttgatacattataacttttttttcttgttactttcacccccagatcctccgagcggcggcgacggctgttgctaagggaggggacgcgcgaggaagcgcgacccgggcggcagacggcacccagcgccaccagccgagcggcgccccctccccaggacccttaaccgcgccgcgtcccggtcgcgcccgccgccctttgaaggagaagcaagtgccgtccccacccccggaaggcgcccccaggagccggagcgacctcggagmgccactcggattttggatttcggtctcgcattccgcggccgggactttctcgaggaggacgcgcgctgctccgcgcccccgagtgcccggaggacccggcatccggggagcctctcgcccctgtcccggaggcgcggcgaggattggcggcgcccgccgcccccagccccccagcgcgcgccggggatggagccgcagcccggcggcgcccggagctgccggcgcggggcccccggcggcgcctgcgagctgggcccggcggccgaggcggcgcccatgagcctcgcyatccacagcaccacgggcacccgctacgacctggccgtgccgcccgacgagacggtggaggggctgcgcaagcggttgtcccagcgcctcaaagtgcccaaggagcgcctggctcttctccacaaagacacgtaggtaccgcgcgcccccggccggccgccccctcgggccccggcccccgggcgggaacaaagagcgcgccgcgcggggaaggcagggggcggccagacagggggcgggggcgcgccgcgcgctctcgggcgccctctgctcggcctcgcctgcctcggccccctcccccgcccggggtcgccgcacaaaggcggctgcgagggcgtcccgggccgggcttcggcggccccccttgggggcgggcaggaatcccagggcgttgcgggggtcccggctgcgggtgtgggggccgccaccgccccctcccgcctgcgtccgcgccggcttccgcatctgctcggcggcctcctctgcgtctggctgtctccccccacttgcgtctctctccccccctttgttctcgcctccgagcgctccccgcagcctcccctcccccctggtatttaaatcgcctgcaggcccggagccctccccccgcgggcctccggggacacgcagtgtccatcccagtggaggggcccatcgggggaggggcggagggggagggtctcctttgtctgcgcggcggcggccgcctgcgccggggagggaggaggagggggagcccggcccggcgcaacccccaggcctctcctcgggccgaaacccgtggttcctacaaagaggagccaggactagaattagggaattgggggcaggggctgccctggggtcgtgggggaaggtggcatagagcacactggggcccagaggaggagaaagtgcctggttggggtgcagagggggtgccagagtccagggcgggggttccactggagggaaggggtccgaatcgccaggatggggctcccagcaccagacggagacctctctgcacgcgcttagggccctggatctggaagccgggaaggggtgggggtgggaacttatccgtctctccccacacaagcacagccctcccccgcggcctctgcttccgcgtccctgtgtcgtctccgcggagtctcatgctcttccttcctccccccagccgrctcagttcggggaagctgcaggagttcggcgtgggtgatggcagcaagctgaccttggtacccaccgtggaagcgggcctcatggtaaatggccatggggctgcgtgcccccagaggcccccgcacacaggcagtagcccctccctcggtacctgtccgcacacacactacctggggcccccaccccgccagccagcagggccctctccaccccctrttccagcccaggattccgaccccacactcaggcccctctcctccctctctttgtagtctcaggcctcaaggccggaacagtccgtgatgcaagctctcgagagtctcacggagacgcaggtaagacctcgccagccccttcctaacagggcagccctgggagcagggtgccttggccaccgacggggcctgggggttgtctgtgctcccaggaggctgggggaggggaggggacgcgccaccccgcctgggtgccagcctggcctggcctccccacctcctctcccccaagattcaccacctgacccggagggctttctctcccacggtggctgccctgggggaagggggcctggctttcacaagactgcctgcaggatgaccttggcctatggggcctcatccccgctcacaccctggcctgcatccccagccccctccgcccccaccgaggagcccccctccagccgctgtggcttccccagagcgagtttctccttttttacatttctgctgagggctgggggtggyggcttgggtgacactccttccgccttccgtgacccccatcgtgagagggtggggatctcgtcaccctcccctcctctctctggcctttgttctctaccccgaaaggggagggggcgggggtgcccagccctggggccagygaggcctagacaggatgttaggaaaatatttagtaagcggccaggagggaggctggggctggccctcacccggttcccggttttgctgcggacttttttttttttttctccttctttcctcattttcttggctgcggccaagccttcctcagacaagggccctggccacctcccaggagggtgacacaggcctcagcaatccgcccgctgccagggtgggggacgcaggctgccacccgccccagcaaggggtggccggcttcccgggcctccctggccccgaggcccgcacccccttccgctttcccagcggcatgtagagtcctgccctttccctacatcgcgggggcagggcgggggccgggagctgggtggyctgccatgggggtggccacagcagcagcagcagtggcgtgggggcagagccggggtcccgagccagggcgggggctgcaggtgatttcctggggcgagtgtgagcagagctccccgccgctggggggctgcggttggcagggggcccagggcgtgttggcttcacaccctcctccctgggcgcctgcgtcaggaaggagctgggttggggggggctggagggggtgctgggcggagacactgggctccccagggttgcttccctgcctggcaccgagtcatgcccgcccattagccttccccagggaggaagttgcagggcgggtggtggtggggactccagctgctctcgggaagccaccccgggcccttcctgcaaaggctgtcttggggcaggggggtagggggccgggcaggctgggccgcagggtgggggcttcaccctgccctcctccctgcctccctccccatgggccccaagcagagaaggttacgccagctactgccagtggagaggagagccgggagggagagctgggaggcggtcggttctgagtcatcccagcctatgtcacttctcagaaacctccgccaccccccccccccatcccggccactggggagagcagggctctggcccatacccagagcagggggcttggcgaggacagggtgagattcaacccacacccaccctgaacgggggcagattgagggtttctgtgcttggagcaggttgtgccctccgggactccagccccagggcggtcagggccccttcctgcagccttgccacagccccctaggcctccgccccgcccaggacagataaatatttatcttgagaaagcaaaggttaggacagaagaattcgtgcaggaattccacccacttgctggccctggtgacttagctgggagggggcctgaggtggagcccctcccgtatccacaggcagagaggatctaggggcccatgagggtgggggaaaggcaaagtgaaggttgtttgaggtcagtgactgccagctgggccccgccccctctggcctcagtttccccttgcaagaccgacctagttggccagggaggggcaggcccccgtctgacccgcctctgtccccacagcccccagcggcgccygggccgggccgggctggcggaggaggcttccggaaatacagattcattttatttaagcgtccgtggcaccgacagggaccccagagcccagagaggggcggcgagaggccccaggtcacagcgcggggggactgggccgggctgggctgggggcrccgcaagctggggctcccagctgacggaccgctctccttgcaggtcagtgacttcctgtcgggccgttcgccactgacactggccttgcgtgtgggcgaccacatgatgttcgtgcagctgcagctcgcggcccagcacgctccactgcaacaccgccatgtgctggccgctgcggccgccgccgctgctgcgcggggggaccccagcatagcctcccccgtgtcctcgccctgccggccggtgtccagtgccgcccgagtccccccggtgcccaccagcccgtcccctgcatctccctcgcccatcacagccggctccttccggtcccacgcagcctccaccacctgcccggaggtgagcctggggaagggaagggtgacccttggttggaatccaaagggtgggccgtcctggggaggtcttggggaggacaaggactcttagtcccaggtgagtcccttgtattaagggctatcctgtgacctcgggctggtgggtgatcccccagcctagattggtggggtatttctagatcctgagttgacggtcatcgcctgacatgacctggaccagtagatgatctcttgatctttgactcatgggtcatctctgtgtcctgggttggttgtgacctcgtgaccttgggctagtttatctctaaaccctgtgttgacaggtcatctcctgacctgggctggtgggtgatctctggtccctgggttgctggtgatcccctgatcctggaccccgtgctcatgtgccccttcctcccatcagcagatggactgctcccccacggccagcagcagtgccagtcctggtgccagcaccacgtctaccccaggggccagccctgccccccgctcccgaaaacccggcgccgtcatcgagagctttgtgaatcacgccccgggggtcttctcagggaccttctctggtaggtgtcacagcacatgygtgagctcacgtgtgtcccgtgaccctgtgcatttggggtctacatccacccacaggygactccacatattctgggcatacacaggctgtgtccgtctgctcacttcacatgtcccccaggaatcccccacacacackcctggccctgcccggggggccgcgggtcaccaggygcctgcatactggggacgtgtcccgctcccgccccgtggtccctcgtgcacatcagcccacatgtccacgccattgcctgagctcatgagctcacacccgtggacgcccgtcctggacatgcgggactgtgcccgtgccgggcactcacggccacctctgcccgcaggcacgctacaccccaactgccaagacagcagcgggcggccgcggcgtgacatcggcaccatcctgcagatcctgaacgacctcctgagcgccacccggcactaccagggcatgcccccttcgctggcccagctccgctgccaygcccagtgctccccggcctcaccggcccccgacctggcccccagaactacctcctgcgagaagctcacggctgccccctcagcctccctgctgcagggccagagccagatccgcatgtgcaagcccccrggtgagtggccaccctcgggggtcctrccttccccgcccgcctgggcttctcaaggcccctctgtgtgagctggtgggctcaggagcagctgacctgcccaggggctgggggggatggcagctgccgtggccactgctctgctccagcccggagagaaggcagcatgtgtgtcagggcacaaagtgtccttgtgtgctcccggggggccacaggcccacttcctcctgccccacccccacccggggcatcatctccagatggcatttggtgcctctgtgaatggccaagtcaggcctggcaggccgaggcggggccagagcccacccctaagcatttcagtgacttggaaaagcagcgaacacaacccccctgccagcctggccccagctactcccaaacggcgggttactccctccagagtctcaccagaagatggctactgtactgcccttgggctctgcacccgtcgcgggggctcctcccagctcagtttaaaagtgggaaactggccgggcgcggtggctcacgcctgtaatcccagcactttgggaggccgacgcgggcggatcacgaggtcaggagatcgagaccatcttggctaacatggtgaaactccgtttccactaaaaatacaaaaaattagccaggcgtggtggtgggcgcctgtagtcccagctactcgggaggctgagacaggagaatggcgtgaacccagaggcggagcttgcagtgagccgagatcgcgccactgcactccagcctgggcgacagagcgagactccgtctcaaaaaaaaaaaaaaaaaaccaaggtacaacccccaagtatctcccctcggatcacagaagcggccaagccccctccatgtaggactccaggaagaatgaggcaggacagtcctgacctccccagctcatggctgagctggagaattagaagccagctgcgtagctgggactccaggcaaacaccaccatgcccagctaattttgtaatttttgtagaggaggggtctcgctctgtggctcaggcctgtctcgaactcctgaggttgcccaggcctgtctcgaactcctgagctcaagcgattctcctgcctcggcctcccaaagtgctgagattacaggcgtgaaccactgtgcccggcatggtggatgtccttgactgtttcctttgctgacctccctccagggagggcaggactgtgtctgacctcaggggcatttgctggggtctggggtggtcctctgtgttcagcaggtggaggctttgggagtcacaggccactacctcctttgcaggggaycggcttcggcagacagaaaaccgcgccacgcgctgcaaggtggaacggctgcagctgcttctgcagcagaaacggctccgtagaaaggcccggcgggacgcgcggggtccgtaccactggtcacccagccgcaaggccggccgcagcgacascagtagcagcgggggcggcggcagccccagcgaggcctccggcttgggcctcgacttcgaggactccgtgtggaagccagaagtcaaccctgacatcaagtcagagttcgtggtggcttaggatcttcggatcggccaccctcgcccctcgcaccccagcccagggcggcggggactccgagagccccggagagaacgtggcccagccctggagggcaggcggccactcccccagccagaagtctttttttcttttcttcttttttattatttttttctttttttaaaaagttctgaccgtggtttcctggactcttcatgggctttgcttcctacctccttcacccttcactcctgccctcctcttcctcctcctcctcctcctcygtctgtctcctttcacctctgcgccaggtcggtcctccctgccaaccttccccagctccaatatgtagcagtctctctggatggcggagagtgaaggagacggagaaacgcgccccatcccttccgccgcctcctttcccccccgaccctattcaggttttaagtcaaaaatgtcgatatgtcattatgcactttacagatgaggggaggggccgcagtgcgcagaacccaccccaccccccagtgcagacttcggggtctccaccccaggccagcagcgcccactgggctacagcaagccaacaggtcacagaagccaacgaggggactgtttctcttccactcctatcctcttttcttgatctttttttttgcattttccttcatttctttaacaaggagagcaaagctgttttagcagaggctggggctgaggtccccatggggtttgggtgcaggggcatggcaccctttcctgtcgggaagggagaggggaactacccccccagcctgccctccgccccgccccagccggcggactgtgctgtttcctccgcccccactcccgtgttttctgacctcctgcctgagtttggggtatttatagactattaattttctgactgagccaatagtggttggggaactcttgaaaaaggggagagaatggctgggtgctggggagttcccccctccgagccctccttcccggcccaacctgagggatgtggatttgggactgtctgggggcccctcctgcagcgaggatgggagggggtgctgagctgtgaatcccctgggcagggggcgacaactccgtgtagcattaacccccgtggcggggtccgctgctggtctaatttggaccccctgcctctcagtgcccctgccctaggggtgtctgtctccagaggggagggacaaatcccctactggggccatttcaatggggtagtttttggatttttttccccactcactttttattttttaatgataatggagatgtctggacccttcctcaccccacctgtcggtcttgtcctggctctgcctgtcccccaccgttgttctcgtaggtgaaccccaggtcctcaactccccccctttatgtgttgaaagttaatggtttcagatgtgaacatcacgtgttataactgtagcgctgtaaatttttttgtgggagggtgggcagggaggggtcccagagggtagagctcaaggattttgggttttgttttgttttcatttttccaaaaaaaaaagaaaaaaaaatagaaaaaaaaggagtaaaaggggcgggtttgttttttgaagaactgtcttggatacctatttaaatgtgtgttctgttttgttttttaacgatttttaaataacgtctgtgcctccactggttgagggtggaacctccaggcaggaaccggctcgccaccctctgcccggtaagggctgcccaagaaagcattacccgccctcggggggtcgggctgtgggggtcccggcacctggcgtgagtttcatgtatgaaaacataaaattgaaaaaaaaaaaaaaacctacacgagcaccgtgatttcaagtaataaacagaaaatgaaacacacattgactcccgcctgctcgcctagtggggggatctggccttggttgggagggttcctggggtgggatgtcagctcagggagtcagagggactgacctgggtcccaaggccccgaagagggggtggggcaggggtcagggccctgagaatttcccacgctccttccccggctgccgggtgggcaggaagcagccagggtgggagggaggagcccagccacttcctggtacccaaggccggaagtcccttagggtgtggggcgagggcctgcctgcctgcttcgtggcctgggcaggaccctggccccctcaggacctgccagtatgggggagacgcgaccaccagctctccccagccacaggagtcggggactcccactctgccacacccacctgctccccttcctggagtctcacatctgtgtggcttgctgcagggagatcaccaggccgactgggaggacctaggactccgcagggtaccttgggctggcaggtgatacaggcctggcttgacccagccctggggggcctctctggccacacctcctgacattccagcccttcccagacctggccttcagctccaaacctcccggcctttgccccctgtctaggaacacccctggtccggctgtcccttgctgtctgggaacttccccagcctgcgccttccacccctgtccaccccgtcccgcagaccccacccttccctctctctgtccctagcctggagctccccgtgagcctcaccaggactgagtcctctctggggtcccacctccacccatgtccgggctgggcagagatgaggcaataacactatttcatgtctttttttaaattttgtaacctgtatttcctcaggtaacaagagttgcctatgagaagtaattgggctcccattttatagatgggagaacagaggcccaaagaggaacatcacttggcccagaggatttggggtgtttgttcaatgatgtgacctccaccccttatcccatctctaggggccccagtaccgggagcccccaggggaaggggcacaggttcagagagtggcctgggagcaccttcctgagacccctctgcccctcccaacgcccagtcaaccccaaatcatcgcacgcccacggcaggaaggcggatgcccagtcaggcggcacccaccccccgccccgtccctggtgcggatgtcccctcggggctcagggtgggggtgcgggtcaccgacgccaggcctggggtcaaggcgagggccccagggcgccaccgccccctcgctgggcggggtgggaaggaggaaggaggatgttgtctgaagcacctgctgaatcacaggggctgtgtctgtagcctgcagggtggggggcgcgtcccctgcactccaggacccgcccctcgggatgccgacccccaccccagactggggatcccaggggtcaaggctgtgccctgggggcgtggggtggggtatggagctccaggctcagagccctggcctggtagggtcagcccaaccaggggtgcagcgggcggaggggcggcaggcggaggccaagtgtgcgtagggaagcacggagaggtaaactgaggcacaaagagggcagggaccgctgggatctcgcggggcggggtcggccctggatcgctcccttcccccaaccattgaggaaaaagctgaatgggagggggcggcccccggaaacccgccgggatggaaacgcggtttccagggcaacgcgccgcgaaaggagcctgacgtcaccccgggtagggcgccctgcccgcccccgtccgcgcgtcgcgcggcccaggccccgcccaccagcggggaagcctcattggtgatcgcaccgctcgctcatcggcgtgccccagtagcagcgcgacgaagcctccagaaggcgggacttcagcccggcagcgccgagtgcgcaggcgcaagcgcggaggcgctgcagccccgcctctctccccgcgcgtctgcaaagttgggggcgggaggcgcagccgagggtctgacggctgcggcggggcctggacggaagagggggcgagccccggggcgccgcacgtggacccccggcacgggcacgctcacgtgcacccgtcctttcacgccaacgcgtttcctgctgcccccacccctgcaccactgcacgtcccagaccccggcccagcctccccgcggtccctaggctgggggagctcagacaggaggctaggaggagggggactttggggctgaggctttgccaaaggagcaggagtttgccaagtgttgtaggaagcgggaagggtgcgccaggtagggggcacggcgtgtgccaaggcccggaaacgtgaaaccgagtgcttttcgggggcaaccgggaagtcagttggtggagaaaaatcaaagatgggaggaaaggcgaggctgacaaggaccctaaacggtgattccccaagtcggccactggagggatgacttgggggaccagagaggaagagcaggtgagggggagcggcggccaggacatctgggaggtggctagacccgtggcctggactttggggggcggtcgagttggatcgatgatcgatggggaccctggcggcctcaccctgggggaggtagagacgaaaaaggaactacggtgtgcccggaaggtggtggctttaggtccacagggaggtggttggcaaggcgggggtaacagggggaaggagaaaatctgaaatgccggtgtgagctccgggccaagagagttgaggactcaggaggcaggaatcccccgtggccgcccgctgcttggctgtgggctccaacttggtgtgtgctcagagaaggcagtggttggagtgaacagggcctgtgccaggtggggagactagccaaggtgtttgtgcagcctggcctctggagcggcctgggaagagctggagttcgcagggtgggagctgccctgtggctgggagcccgtgctggcgtccctgccaggcggtgatctcacaggtgagcggtgcttggggagacgcggagctgtgggcgggcaggagaaggtcagtggaggtcatggcttttggcttgaggccggagtcctctgggggtggccgaatgggcccttggagctgccttgggaggtggctagggtggacagcagtggaagccaggcccttggcttagagccactgggttggagggattgagccagtgcccgggcacagccgcccccacagggccttgccccacccgccctcctctcccagcaccatgggaatgggagttaccgggctggaggctggggacgccaccaccccgtggccaagggcgttggggcccaacccaggagcctggtgcagccccacccacgggccgcccagccctggaagggcagagaactggctgcctctggggtcacttgggacaggtgagcagcccagcccagcccagcgggtgggggaggggaggctgtcacctgggccctgcctccaccctctttctggttctcactccctccatttctctttcttttgcctttctctatttctgtcccgatctctggcgctctccccaacccagtaccaccatctccgcccctccgtccctcccctgcttccgccccctctctgggggcccccttcaccccggggcacattccagcttcctcccccgccttgcagtccctccctggagccagctgcctcctcggttgccagagcagagagagtgggcttgggccgaggtcggaggtcgaggagcgggcgggagcctgggagggcacccccaacccctctggaatgtgggtggagcggggcaagggagacagctggtttccacggagggcacatgccccatacccaggacgctacccacactcagccctgggggagagcaagcaaaaccaatgggtgccatcccacgaggggcctgcacagccatcccacacccccgaccagcacgcccgggacagccctccacaggccacgcatttatgggtgcggctggtgtgccaggctcccagatacacaacccccccccccagacacaccccatatacctgtccccaacctcaatccactgtgtgaccctaaaacaaacagaacctccttgctcagcctgggccaaggcctccccaaacaaaactccagcctgcagagtcccaccacaccccgcagctgtcaccagatacaaagagggccctgaccagatacagagagggcagcagccttcccccacaaccaacacacgcctgggcgggggcaggaacacccccagggcctccagccacagacactcacccactcacccctctgtgcaccagtgatcctccgctgcccagccaagcttgactccagcctgctggagtctgggtgggggatggagaggggttcccaggcgagccccaacctatgccttccaaaagtctttctgtgcatgttggaaatacaaatgaaacaggagagttagcatacgggacaattattatttttgtttgtttttgttttgagacggagtctcgctctgtcgccctggctggagtgcattggcgcgatctcggctcaccgcaacctctgcctcccgggttcaagtgattctcctgcctcagcctctggagtagctgggattacaggcgcccgccaccacgcccggctaatttttgtatttttttagtagagacgggctttccccatgttggccaggcaggtctcgaactcctgatctcaagtgatctgcctgtctcggcctcctaaagtgctgggattacaggcgtgagctacagcatccagcccaattttatttatttttagtagagaagggatttcaccatgttggtcaggctggtctcaaactcctgccctcaaatgatccacccgcattggcctcccaaattgctgggattacaggtgtgagccaccacacctggccccagttattagtattttcgagacggggtctcactctctttccaggctggaacgcagtggctccatcacagctcactgcagcctcgctggaactcctgggctcaagcgatcctcctgcctcagcctcctgagtagctgggactacaggtgagcaccaccatgcccagctaattttgctttttttttttttttgtagagacagggtctagctatgttgccccggctggtatcaaactcctggactcaaacgaaagtgctgggattccaggcatgagccagcgctcccggcctgcatacgggatgattccatgtggactgccacatcaaggaagcaaacaacaaggaaagcctggcgctgcgtggagctgtcttttgctgctaactgcccttgaccgacttcctaccaggtcttccctgtgcgcctctaaccccaggaggtgctgctggcatgcccacctctcagatgaagcagtgcggtccagagagcgtcttgggcaccgcctgcctcacagctgggcccctgaccctccagggactgtggctgagcagccatggctgcctggacgggtgtcccctggcccgtctgtccgtctggatgtgggaaccctccaggcacgctggggcgggcaggtgccaggtgcctctccagcaagatgcaacataggtgtcttcacttgcactccgtaggtcctgagcccctgcagctgcctgggagagtggggaaatactctccacttgtcccactccactgttgccatggagatacctcccaccctaggcagggccaccctgagcctggttggctttgcaggaaatccccactctttgacctctctgttaggcacaggacgtgtagtcccatgagagggaactgggcccaggtggagatccatccgcctaccccagagcgcgcatctgttgctaagcaacatctgaggctgcatggaggtgggggctccggagcccccagaccttttcccagtttcagaaactaggtggctgcatccccagcgtccacgcaggcgagcctaagcctcggtcagctttagggtgtccgtgggccatgcagggtcttgggcctttcac

SEQ ID NO: 97674 - DNA, 81709 bp, Homo sapiens
  misc_feature (1)...(81709): n = A,T,C or G
ctgaagttttctgcaatttgaaataattaagacaggctggacagagtggctcatgcctgtaatcctagcattttgggaggccgaggcaggtggattgcttgaggccaggagtttgagaccaggctgggcgacacagtaagaccccatctctacaaaaaaaagaaagaaagagagagagaaagaaagagagagagagagaaagaaagaaagaaggaaatagagagagagagagaaagaaagagagaaagaaagaaagaaagaaagaaagaaagaaagaaagaaagaaagaaagaaagaaagaaatgggccaggtgtgatggctcatgcctgtaatcccagcactttgggaggccaaggtgggaggactgcttgagctcaggagttcaagactaatctgggtaaaatggtgaaaccccgtctctataaaaagtaaaaaaattggccaggcatggtggtgcatacctgtagtcccagctacttaggaggctgactggggaggattgcttgagcgcagcaggcagaggctgcagtgggctgtgactataccactgcactccagcctgggcgacagggtgattcccagtctcaaacaacaacaaagcctgggcgcagtggctcacgcctgtaatcctggcactttgggaggctgaggcaggtggatcacgaggtcaggagttcaagaccagcctggccaggatggtggaaccccgtctctactaaaaatacaaaaaattagccgggtgtggcggcgggtgcctgtagtcccagctactcgggaggctgaggcagagaattacttgaacccgggaggtggaggttgcagtgagccaagatcgcgccactgcactccagccttcttgtcaacggagcgagactccgtctcaaaaacaacaagaacaacaacagcagcagcaacaaaaagtactcgtcacgtacctacagttgaattttaactgggtgtcttgtgtttgatctggcaaccccacttccacaattctctcgaaggggctgggaagacatttaggaggacctgtatgggatggggaagagggagggtttagggaggagagtgttgacgtcaaacacagccccaccagaaaacctccacaaatgtacaactctgtcccccaggagagctctccacccttcacatggcaccgaggacctgggcctgggccagagctggaagcctgagagctctctgcggggtgggactactgggggacggggctatccacacctctgaccagttgagcgtctcccctggggggcggcttccaaagtctgagccaggagagctggtgccggccagggccctcaccccatctctgcccatctgtggcgtcaaaaatgcctcctctcttgaactccaactgcagcattcatccttattattttctcattgaacatccacttcagtgacgccatggactgggccgaggaaaatcaagaatttccctagggtggctcaagcctggaatcccagcaatatgggaggccaaggcaggcggatcacgaggtcaagagctcgagaccatcctggtcaacatggtgaaaccctgcctctactgaaaatacaaaaattagccgggcatggtggcacgtgcctgtaatcccagctacttgggaggctgaggcaagataatcacttggacccaagaggcaggggttgcactaagttgagctcatgcccctgcactccagcctgggtgaaagggccagacttcgtctcaaaaaaaaaaaaaaaaagaatttcatttggaaatattcgtagtggttaaattctattaggcactgtctgtccattgagttgtctgaacaacctagcagctagttgctattattattattatcattattattattttttttgagacagagtcttgctctgttgcccaggctggagtgcagtggtgcgatctcagctcattgcaacctccgcctcccgggttcaagcgattctcctgcctcagcctccggagtggttgggaccacaggtacgtaccatcatgtccggcttatttttgtatttttagtagagacagggtttcaccatgttatccaggatggtctcaatctcttgacctcgtgatcttcccgtctcagcctcccaaagtgctgggattacaggtataagccaccgtgcccggccactagttgctattattatcaccctccccattttataggtgggaaaaccggggcacagagaggttaagtaactctccttgggtcacacagcagattcacagcactgtactccaggctgggccatgagccccagtactgtgtccctgctgctttccggagccaccccctgtgattccctggaaatccccgcatctgactaattccctaagcatcccccaacttggcagattcctgcctgctgagatggctggacccaccccggcctgggcaaactgcccccactttaggcaaaatcacccatcgagaccttgtggtttcccgaggtggatgtggcagagatcgagcccacgcctcttcctagctcacttggtgacctcagggcagcttctgaacagttcgtgcctcagtttcctccctcgtgaaatgcaggtaataccagtcgctaccccagagggccgctgtgggagcagggccggcgtcgtgggtgtgtgtgactcggggcttcgcccaccgcctgcactcagaaggtcccggcgctcagcgtgatgctttgctgttgcctaacccaagctatgaaatatgttttgtgccggggcaccgtgttttcatttccactgatcctcaaaagttgtgtggatggtccagtgtgggaggaaatgagcagatgcagccgccaccctccagtccccaggctggcttcctcacccttccaaatctttagtgcctattgctcaatttaactgctgttcaatttgctgtgaaaagagtctcagccaggcacggtggctcatgcctgtaatcccagcactttgggaggccgaggcaggcagatcacctgaggtcaggagtttgagaccagcctgaccaacatggagaaaccctatttctacggaaaatacaaaattagctgggcatggtggcacatgcctgtaatcccagctacttggcaggctgaggcaggataaccacttgaacaggggaggaggaggttgcagtgggccaagattgcgccaatgcactccagcctgggcaacaggagtgaaactccatctcaaaaaaaagagaaaatagtctcaaagttgagatgagcacccagtttgccaaaaccgggaggcagaggtcatgccattgcactccggcctgggagacacagcaagactccatctcaaaaaaaaggagatttggccgggtgcgttggctcacgcccgtaatcccagcactttgggtggccgaggcgggcggatcacgaggtcaggagatcgagaccatcctggctaacacggtgaaaccccgtctctactaaaaatacaaaaaattagccggggtggtggcgggcgcctgcagtcccagctactcaggaggctgaggcaggagaatggcatgaacctgggaggtggagcttgcagtgagctgagattgcgccactgcactccagcctgggcgacagagccagactccgtcccaaaaaaaaaaaaaaaaaaaagagattcagtgtggagggaagtatctctgtcgggtccggctgctctgcgggactctgaggaaaagctcacaacaggtggacgccgttctgtcaccatgggtaaaggagacccccaatgagctgaaggacaaaatgtccttgtgcgccttctgcatctcactctggacatatcacttctgccttctgggtctgagtttccccatctgcccccttgtgcttttgggtttgatgacaggggtccttggcctgaaattttttttttttttttttttttagacggggtcttgtcatgtcacccaggctggagtgcaatggcgcgatctcagctcactgcaacctccgcctcccagattcaagtgattctcctgcctcagcctcctgagtagtcaggattacaggcacccactaccacgcctggctaatttttgtatttttagtagagacagggtttcaccatgttcgtcaggctggtgttgaacttctgacctaggtgattcacccacctcagcctcccaaagtgttgggattacaggcgtgagccaccgttttttgtttgtttgtttttttgagaccgaacctcactctatcgcccaggctggagtgcagtggtgtgatctcagctcactgcaacctctacctcctgggttcaagcgattctcctgcctcagcctccctagtagctgggactacaggcaggcaccaccatgcccagctaacttttttgtacttttagtagagatggggtttcaccatgttggccaggctggtctcaaaccgctgacctcaggtgttcctcctgcctcagactcccgtagtgctgggattacaggcgtgagccaccgtgcctggcttttggcctcagttttttagagaggtgctaaaatatcttaaacctgcttattatctgccttaccaggccttctttgcccggactgttcttcctactcttgtctacctggtacactcctacttgaacttcaaaaccccagcttcaacacactcttcagcatgcagccctctatgaagccctaggcagacatttcaaccctcccagagatcccgcatattggagtgtctggtcctggttctctctcccctagaccaggggctttctgatgttgggacagacagctgagtcctctgtgagaccctgggttttcccagctcatgaccaagcacagagcagcatcgattagaagtcactgaatgaattaacaaagtcatggagaaatcaactccagtttcagggggttggaatgggggcagaggcctctggcttgtggctgcttgggtccagggagctgtatcagtattgtcatggctgaaattgggctggggaggcggtggtgcctcccacactggatctgccttcactggctcaagtcacaggaaaagtgccctgagactccagctccccacgcagggcagcctcccaccacagccaccgagaggaggagcccctcaggcccccgtggccctgcctgaaaggatcctgctctcttgggggtagcccctgggacttacccaaacccccatgtgccagtcaccatgctgaagcgtccagaactgtatttggttagggagagagattaatgaacagagataacttttcgtgagagagtatgtctgacaggcccagaggtgatgattttatttcattttattttatttcgttatttatttatttatttttgagatggagtctcactctgttgcccgggctggagtgcagtggtgcgatctcagctcactgcaataactacctcccaggttcaagcgatactactgcctcagcctcctgagtagctgggattacaggtgcccgccatcacgcccagctaatttttgtatatttagtagagacggggtttcatcatattgtccaggttggcctcaaactcccgacctcaagtgatccatccgcctcagcctctcaaagtgctgcgattacaggcgtgagccactgcgcccggctggtgatcgtcttagtagcttttgagggagtctcagtttaaaagtctcgggtgagtgagccccagtgggggacgtggcacatgcagaggcttggagggggttctgaggaaggaggaaaaaaggggatgctgtaccacaaagcagattccatttcaccagcacggtgcagaagaggaaactgaggcttgaggaggtgaaagcacatgctggggtctcaagagaaccaggcagggcgggattcgaacccagagccgtaggagtcccagccccttccgaatagcggaaggacctcaagggattggcttggaaggtggccccgcccccgaaccgagaccacgcccccgcaggtggaggccccgccccgcggcatgaccggaagtgcgcggggcccccaagatggcgcccgaaacccggaagtgagcggcggcagctgcgaggctcggagaaacaggcgccgcgggctccgcgcccggccggacccgggcccgaggtgaggctctggttgcgacccccgccccggctccaccgcgacccctgcctggcccgaccccgcttgtgggtccggcgctccccgcggacccctgcgcccggggctgggggttctgggggccgtggggcgggggcgagcgcggcgggacccccgccctccgccgcgaccccttccgaccccgcccttcgccgccaacgttgaccccgcgctgccccgcgaccaccgccgtgaaccttgacctgcccccccgccccccggcgaccccctgccgtgaaccttaaccctaccttccacgacaaccctcccaacctttccttcccgctcttccgggtgactccctgtaccgcgcagcttggtgacccccgacctttcgttttctggtaacccttgaccccgcactcatcggtgcccccgagccccttggtgaccccgcacccgcttttcctcggtatcctggccttcccttttggggactctcgactccatgcgcctcgtgacctcgaccccttcctgggagtgacccccggtctctcccgccgccccgattcctgactccaggctcctcgggcgttcgtgccccttcctcctccttgtccccggtcccaggacccttgccctctcggccccgcagcgcagccctgtctccctccctccccttgctccccgcccctcccgctcctggggcctccgacttctcttctggggcagatggtttttcggtttctgcatggaggtcccccggtttgggatgggggcttgctgatattaggtgaccccggggccgtctgggcggagtctgcagagcgtgttgggggtgggagtgcgggtcgcattcaaacccggcttccagggacaggcgggagggagggtagcgggctgagatggcccgagtggggcccgggagcagcgtgtgtcggtgaaggggaagcgcaggcctcctggtgggtcctgtcccccgtagggcactcttcccaccaccccagagtcccgaagaataaggcaggtggggcctggagggaccaatccccagactgacctggggcgtggggggcaggcgttgtggagagcccacccagcgcctccagggacgccgggcacggatggtgctggggcagggacggtgggtgtctccctggatgaactgattaacattctgaaaagttaaaaaaaaaaaaaaaaatctctaaaatgtgtagccggggcctcccctggctgcttcttcccggaatgcctgttgttcccgcctgctcagaacgtccttcctgcctgtgactgctgggacgggacgggataggtttggtgccatctgttgcacgccctgtcagcgagagtgcccggcctcggagctggcctgtgctgatgctggctgccagtttgccgggggggggggggggcggttgcagtgagtgttttacagaggggcagaggaagccgaggttcaagagaagagcatgggaggggccgaggacccagggccgcagaccccgtgggcagccagcccgattacacggggattacaggcttcaaactttcttccaggcctcttcctccgggccagggcagccggcactgcttcctgactgaggggtgctgtgctgtttygggtgccctccctgggatgtctctccctgactcggccctggaagaggagcagcggggacatgggacccagagagtttgtggcaggcccagcaggtgccgtccacgccctttcttcccagacatcctctggccttcagggatctggctgcccggccccagattttcccaggggtgaccctggtcgtggggtgatggcttctcacagtggcctgctccgggccaccttcagagttcttgccgagaaagggcgaatttgagatctggaccccttggtgggtgggatggagaacagcaggatgggggcctcagggcctcccacggcaggggagacggcagaggagacgcaggcaggctctcgtccttggagagggaaggacttggaaggcgcctgccagcccctggagtgtgatttcagagcacagggaggaggcttttgtttaactctgaggatcccggcagacatctgcccacacctgccaggagccaggagggccctggtgtggagggggctgtgcaggcaggggctggacttcagggggagggagcctgtcagagcacagaagaggcagcaggagcttccctcatccattcactctcagtttgctttggggtctggcctctccgttcatccattcactcttggttggctttggagtctgggctagacaggaggcacccaggtgtgcaggtgcggaggagagggtgcatgttctccagccgcgtgaccatgggcagtcactgccctctcacctggcggggaaaccgaggtggagagaggttgcgccagccacccctagaccccccacccacttgctgcctaaggcctcccccaaccccaggggtgtgaggggtgtgaccagcttgggcttggcccaacccggctccagcggagtcacggatgcccctccggcagggcccatgcggaaacgccaacaccgccagagtgagctctgccccgaacaaagaggcgactgtgtcgacagaaccagtccggctcccagaggccccctcccagggggcccccatgctggggggtgggatcagctctgggaagggggcggtatcatgtaatccacagctgtaaacactcctggaggcggtgtggaggcagccccccatgacgccagcgctgccctggggactctgcatgtgtgtgtacacgtgtctttgtgtatctgtatgttgcgccatgtgcatgcacatgtgtgttgtgtgcctgtgtgttgtatggatgtgtgtattctttgtgtgcattgtacgtacgcacgtgcattctgtgtgtgcgtcgtacggacgtgtgcgcgttctgtgtgtgtgttgtacggatgtgggtgcgttgtgtgtgtgtgaatgtgcrtgcctgtggctgtgtgctcctgtgcatgtgtgtgttgctcgtgtgtttcatacgcgtgtgttttatgggtgcacattgtgtgcgtgtctgtgcatccgtgtttgtgtgttgtgtgtgcctgtgcacccgtgtttgtgttgtgtgtgtgcctgtgtgtacccatgttcatgagtcggttatgygtgtctgtrttttgtgtgttgcccgtgcctgtgtgcctgtcctcgtatgttgtgtgtgtgtattttggtggttgtgtgtattttgtgtgtgtgctcatgttatgtgtgtgttgcctgtgcccatgtgcccatgcttgcgtgtgttgctcacacatgtattttgtgtgtgtttgtgttgtgggtgcatgtgtatgacctttgcacccgtgctcrtgcaaacgtgtactttgtgtgcatgttgtgtgtgcccgcatgttgcctgtgcacctgtgtccgttatgcacgtgtccgttgtgtgtgttgtgtgygtgctgcgtgttctcatgcacccctgcttgtgcatgtcttgtgcacgtgtgttttgtatgtgtgcgtgtgttgtgtgcacgtgtgtggcctgtccctgtgtgcatgtgtgtgtgatttgttgcgggcaggcctggaatacctccagtcactttttccacagccgagggctgtgtggtcagacagcacacggggagggctgggtgtgtccagctgccgggttgaagcctaaaagcgaggtcaccccaacctggttctcgtcctggcctgcccgctgtccgcccrgcagtgtgggtggactctcagccttgcccctcgcctctgcactctcgcccccaacccccgggaggttggccggcacctgcaccctcgggctgggacgaagagcagactgccagccccgtggtcaccttgcctccctgctgggaggtgyggtcacccgtcacagggcccaggactcaggagagggctcagccctgcgggcgaaggcaaacctggggttctggccaagacggggatttcggatgcgtgggccccatcagctctcgccctgggcctcctgggccccgtgaggaggcggagattagatctgtcgtctgtgcgcccggcatggatgctctgcggagacgtgcttgcggagagacgccagacgcaaaaggccacggcacgtgactccgttcatgtgacgtgtgcagagcagggcagtccacagatggggggtagacgtgtggtcacgtgtccagagcaggccagtccacagaagagaagtgggcgtgtggttgcaggggctgtagaggcgggggagtgactgctgttggggacacggctgtgttttgggggagcggaatrttttggaattagaagctgtggtggtctgccttagaatacgttgaaaccgttgagtcatatgctccggacaggtgcccctcctggtgtggattgtatctcagggaaaataaaagtgtttaacagaaagtaagacctccctgtccttcggaatccccagttgtcaccacagggttgagcacggtgtccccgggaactggtcaggcagccctgcagccagcttgcatcaaggggtgatgggcagctgtcctgtctcaacccgtaggacggcaacagtgatggcatcaccccaccccccgggggcccctcgcccaggcccagctctgcccctgaaccactcactgcttcggaggggcagggaatgctgcattctactcgaaggggccctacggggctcttggcatgagggggacaggccttgggccacatgggtggcacacaggggccagtcagcctgagggtgcctggtggtccaggcggaggccccgtgagagctcagcrtggcagcgtggccctgaagctcagtcccacggaggcctcagcctggggccgcactcgtgccctgtgccctggctctcctgcggattcccctgggcctcttgccctggacaaccccatgagtgatggggtgggaggaggggcccagagagtcattgccgagtcatctcccctgcaggcactgtcccgggcagcctcgtgcagtgcagggcatgggagtgctgggccctggctggggtcagcagatcggactggcgggcctggtgccgctgtctcagtgacctgctttgtgactcgtgcccgtgcttcccggagccttgygattgacctccatccccagcaagaacaagcgtccaagtgaaacygaaagaggcggccttggccttggttccaggccccgctgcgttttgaaagtgatgtgcgccaggttccggaaggcggctcactcgcgtttcctgggagtctctgccgctgtgggctcctggggccaaggccctgggtgctggggcgtggggagggggagccggtgagccttcgggcctggcgggcagtaaacgtttctggaactgactcacttgctggggaggggcagccagggagggtcacggagaaagtccctgcccgccatggcccyggaccgccgtcggctgcccgtccagcctggagtgaggaggcgtcttcctttgcatgtcaggtaaactgaggaaagctgcctctggggtctgctgcgctcgccgcctggcttccggtgcccaggggccgggtggaatgggtcgcgggacccacgctggtgaccgcagcctccctacgctgtgagagggccaggcttcgtggggacagacagccgccagggtgcctggaacccatgggtgtgaggggggttccaaggccacgggggacggtgaggagcttctcagggcggcatcactgtgaccagaatgttttcactggtggggcaggggcccagccccggaagctaccgggtgggtctcactcagctgggcgctggggccctggtggagaatggctgtcggtgttgcccgggtgtggctgggctgaccggggcattttcgggggcttttatcagatcctggaatgactgctacccgccaggagcttgggggagctgcgagcccccaggtggatgcaggagctctcggggtggccctgaggtctgggcacccaacgctgccccggggtgggggtgtggatgcttgaattgcttgccgactttggaacaccaggggctgccaccctcaaacgcagacttgtggcttctcttgaaaaaccagatgatctagaaaccctggccacattcctgcccacaagtctccgctgcccctccccaggggtgcacctgtgtggccccctcccccagctctggtgaggcggctcctgccccacttggaggatgtgggaggggtggggaggttacactgagagggggatactcgagctcctcatycacagcctctgggcccctaaaaggagtgggagcgtgtccccggagcctgctcccgtactcagtggccggctttgctcctggctggccgttcaggagcctgggtttccgtgcacgcggcctgaccgcaggctgagacctcatggcctggcgctgtgtactgcaggtctgggtcagccccagagaagccaccgtcccccccaccccctggagccgtgggtgtggtgcctcccggggcacaggggctctgcagaggggtcgtcctggattcctcgggtcccggcatcgtcacaaatgtcctcatgcgtgggacccttctccagctggaggaggggaggtcaggtcagaagcctaagagggaccttgccctgctggcttttaggagggagggatggcgtgatgggggacgtggctccccgaaagcagggaagtggggcctcagcccagtggccacagggagcagaatcccgcccccggccgagctcaggcgcggactctcccggagaacccagaccagggcccaggacagcagtgccttgaccttggccttggagccgtggccgtggagcagccagcccaccyggacctctgacctgctgggcccagagagggcgcgtgggtgtcgttgtcagcagctacgtttgagggaaggtggatcaggccgcactggcgaacctggagttcctgcttctgtgatttcgggccctcagttccctcctccaggcgtggagcagcgcctaactgtgcggccattgtcaggacagggyrcgtagctccagcagtcagcgctgaagtctcgctctaagcggtcttggagctgccgtcctcaagcccagcccgaagccagaagggactcttcctcctcctccaggacctgatgccctcagggctcggatgcaggtccttgtgacatttttgtcaccaaggctggacttaagctcaaggacagtggtgaccggtcgagccacttgtctgggatcagcatagcccggctgctggcaacgcttggcactccccaaggagccaggtggggagaccttgtggcctgaggccgctgatgtgaggcagtgacagtagcaggtgtgggatgggccagactaccctccacatggattgaagacacacaagggcacctccatttcaaaggaccggaagtctggagtgagtggggatttrgcttaacgtctgctcaggagaaaaagacgtgtaggttagaggggaccacaggctcaagctcagcatgttaaaaggtttttagcgtgtgtggcttttagcktgtgtgtgtgtgtgtgtgtgtgtgtgygcgtgcagttgcggtctcgctctgttgcccaggctggtctccacctcctgggctcacgcagtcctcccagcactgggattacagccacgggccaccgcactggccccaaaagactgaaaataaacacaagacccgagcgggctcctcacagcagcagaagccgcgtggaagctgcttggctgccacagaaagccgcaccaccctgkccaggcggacaggcctttaaccgccaggtagcagtgaggcccgctcggagcatggggaccctgctttggagccccgcagcccggcctggaggctgtttccgcataagcatttgtgtcgtggaatctcctttccactccctcaccgggcctccctctgggctggggtctgggatctggggatctgaagtctgggatctggggtctggaatctcgggtctgggatctggggtctggggtctgggatctggggtctgagatctgggatctggggtctgggggtctgagatctggggtctgggatctggggtctggggtctgggatctggggtctgagatctggggtctggggtctgagatctggggtctggagtctgagatctggggtctgagatctggggtctggggtctgagatctggggtctgggtactggggtctggggtctgggatctagggatctgaagtctgggatctggggtctgagatctgggatctgggatctgaggtctgggttctgggatctggggtctggttccccagatgtggtttcttyctaaaaggcatcggcctcacattcctggcttgggactcttgctctgtccaagggtacgggactgagtgccagcaaccaccactactccacttggctctgactctgggcctggacttccttctgttctcagggacagcagtgctgccttgggggtgcccggcaccctgctcgcatctcagccacgacgtccccctggccctgtggcttccactttcggggttggcttgggatgaagcaccaaggcccctccccagggcctcctttattccctttccaggcctgcattcrgcaccgtgctgaccatgcctggtggggctgtggggtcagctgagcagccctgacctggtggagctcctgacggcggggtcagatgtcaggcrgggccacgctcaactccgggtcctccctcgcatggcgggggctgctgcgcaggggttgctggatcctacctgttgggcgtgtgaccctggctcgggctggacgccttgtttgcttcagggcagtggagtcttgacctcctcsgggcacaccctgtggaagacccacagtgccgccgctgcctcctcctcctcctcctcctgttcctcctcctcctcctgttcctcctcctcctcctcctgtgcctcctcctcctcctcctgtgcctcctcctcctcctcctcctgttcctcctcctcctcctgttcctcctcctcctcctgttcctcctcctcctcctgttcctcctcctcctcctgtgcttcctcctcctcctcctgtgcctcctcctcctgctgttcctcctcctcctcctcctgttcctcctcctcctcctcctcctgttcctcctcctcctcctgtctccactgccccggcatctgggacgtccccacagtgtcctagcacctgtttctcctcctcctcctcctcctgctcctcctcctcctcctgctcctcctcctcctcctcctgtctccactgcccctggcatctgggatgtccccacagtgtcctagcacctgttcctcctcctcctcctcttcctgttcctcctcctcctcctcctgttcttcctcctcctcctcctcctcctcctgttcctcctcctcctcctcctgttcctcctcctcctcctcctcctgttcctcctcctcctcctcctgtctccactgcccctggcatctgggacaccccacagtgtcctagcacctgttcctcctcctcctcctcctcctcctcctgttcctcctcctcctcctcctgtctccactgcccctggcatctgggacgtccccacagtgtcctagcacctgtttctcctcctcctcctcctcctgttcctcctcctcctcctcctcctcctcctcctgtctccactgcccctggcatctgggacgtccccacagtgtcctagcacctgttcctgtgcacgggggaggctttgtgctggagcaggacaggaggtttggcaagagaagctgtcagttcggccacccgctcaagctgttcctgctcctggccatctccgagcttgggaactttccctcccatggcaccgccccttggcccctccggaaggccccggaagccatgggcaggggcttccctcgaaatcggggtgcagtgtgaagcccccacggccaacacccttgagccctcccaggagaggggccgtgatggccgcgggcctgagtttccagaggacccacctggagggaggtccttggtcggggggaggggagcttcctgggcgctgggttccgaccccgtcctcagggcgctgagtctggccagtacacctttccctgtgagagaagcacrtgggctcctggggtatggggcggtgaggctgcagtgccccttccacctccaggcaaccggggccactgccgttcctcgtggggcggggagaacttgctcgccctggaccccggctcctgccctcctgccgggcccacctcgtcctcatcctaaattgaggggccgtcccccagcatgcttgagaaatgtcaggcggtgctgggccggtctggggcccccaggcttccccggcgccgcctggcctgtgcctgcgcgtggcagggtccaagctcgggagcggtggcctctgcccgtggttggcagcctggagccactgcggtccagacgcctcctgggaygctgtggaaatccacagacagcctcgtgccgcctcaccccagggcacccgagtcctcgtgctcacgggagtcgcgtggggctcagggctggagcagcctcctccctggacgagcttctcgtggcggccgcagcagtgctgcaaactgggtggcttagagcagcctgtccctgtcctggaggccacaggaagctgaggtcaaggagtagctccaggggaggacccttcctgcccctcccagcttccggggctccaggcgcccttggtctgcggccgcgtcactccagcctctgctccgtctccatgcggccgtctcccgatgtgtgggtgtccacgttcctcttttctcttaaggacatgagttgttaacagggacacagaccaccccctccagcatcctcattgtaaccaaccacgtgtgcaaagaccctgtatgcaaataaggccccacccacaggtgcgggtagatgtgagtctggagggactgtagtcaccccggtgccctctctgtccctggcactccctcttgcacctcaggaccagcctccaaatcgtcacttaccagatcctgtcttggccttgtggcccgcaggcactgtggggtctgatcctgcccccatacgtccccagcacaggctgtccctggggctctgtcccgtccacattrgtggccctgcagccccaacgtcccctcccctctgccagttggagtctggaatgtgggtggacgatggtctgctctcttcccactgaacgctgtccggcggctggactgggtgtgcatgtagctggtctacagggtcctcacatgggctagggaaaccagcgtcaggttcctggtctccgtttctctgtgtgtcagatgaggggctagaccagctctggggagctctggagatggggttgaaggtcaggaaggcctctcttggtctggaggttgggctccacctcacaaagctgggagaaggttgccggcctggagaagtctggtccctcaaggccgatgtcagctggtccctccggggcgtcagcctcctgcctctggcaggctcgtatgggtgagaggaagccagatttccaccttgcaggggttgagatccaggctcctgcccccaacagcgtttctttttttttttttgagacggagtctcgctctttcacccaggctggagtgcagtggcccgatctcggctcactgcaagcgccgcctcccgggttcaygccattctcctgcctcggcctcccgagtagctgggactacaggcacccgccaccacgcctggataattttttgtattttttagtagagacggggtttcaccgtgttagccaggctggtctcgatctcctgacctcgtgatccacccgcctyggcctcccaaagtgctgggattacaggcrtgagccaccgcggctggccccccccyyyttttttttttttttttgaggattttcgttcttgttgcccaggctggagtgcggtggtaggatcttggctcactgtctcctccaactcccgggttcaagcgattctcctgactcagcctcctgagtagctgggattacaggcgcgcaccaccatgcctggctaattttttgtatttttagtagaaatggggttttgccatgttggccaggctggtctcaaactcctgacctccagtgatccacccgccttggcctcccaaagtgcttggattacaggtgtgagccaccatgcctggcctcccaacagcatttctgaggatagagagggagggtggcaccctctggaggagaggcggggtctggggccccaggggctgtgggtcttcatcctgaggtctttaagctgctgccgagctggagcagaagtgcggccccatcgggctgggctgcggtttaggtggacacccctggacttgtgggcaggtgggtgtggagggcggagggaagatggacggttccacagcttcttcattcatggactggcagcttggcaaggggtgggggacccagctggccctgggggaggaaacacgcacacgtggcgctctgggatcctgagatgcaggcatcagtgtgtcggtcagcgtgacgcacacgtggctctccagggatcctgagacgcaggcattggcgtgtcagtcacacgtcactctcagggttcctgagaagcaggcattggcatgtgagtgtgacgcacacacaccactttcggggcccctggggtgcaggtgtccggcatgttggtcattgtgcaccagtcgaggtgcccttgggagacctggccctgcgccttgtggtaagggggggtccacccggggtccgtgctccctggacgcagcctgggccagtggtgccctggtcctttcacgggtgggctgggctctgagcaggcagcgagcccggggagggaggactgggtctgggcccaagcctggggcctcccccatgattggcttttgggctgcacgggggatgagggtcagaactgccgcccgtgtggccgggtgccacccgcgtgcctgtggtttgccaggctggccttttcctgcatgaaggtttgcggcagctgaggatgcggcttctcccacagctggtggagggcctggcgggcagcagagccatgagcccaacatgttttcccagttcatgctgggaatcacactttttaaaatttttattttattttattttattttgagacagagtgtcactctgttgctcaggctggagtgcagtggcgtgatctcggctcactgcaacctccgcctcctgggttcaagcgattctcctgcctcagcctcccgagtagctgggattacaggtgtgcaccacgacactggctatttgtgtgtgtgtgtgtttagtagagacggggtttcgccacgttgctcaggctggtcttgaactcctgacctcaagtgatctgcctgccttggcctcccaaagtgctgggattataggcgtgagccaccacacccaaccacagtttttacttttgagataattgcagatttgtggctatggtaagaagtgatacaattatggtaagaagtgatataaagagattccccccacgtgtttccctcagtggtaaggtcttgtacaatgagagaacaatgttaccaactagatattgacgctggcatgggccaccttccccattgtgtggtggcaggtgtgagtgtgtgtgcaggtgcatgtgggggtggggcagggtgtgcctatgcaggtgggtgtgtgtgcaggtgcaggtggggtgcgcgtgggggtgggggggttgtgcctatgcaggtgggtgtgtgtgcaggtgcaggtggggtgcccgtgcaggcacaggtgccattggggtctatgtgcatttgtgggtggggtgcgtgtgtcggttcatgtgtgggtgcaggtgtggatgtctgtgcaggtgtgtgtgggcatggcacactcatgtctgtggccgtgtgccgagatgcgtgtgcgggtgcgtgggtgtgtggcacactcgtgtctgtggccgtgtgctgagatgcgtgtgtgggtgtgacacactcgtgtctgtggctgtgcactgggatgcctgtacaggtgtgtgtgggtgtggcacactcgtgtctgtggccgcgtgctgagatgcgtgtgtgggtgtgacacactcgtgtctgtggctgtgcactgggatgcctgtacaggtgtgtgtgggcgtggcacactcgtgtctgtggctgtctgctgagatgcgtgtgcgggtgcgtgggtgtgtggcacactcttgtctgtggccgtgcgctgagatgcgtgtgtgggtgcgtgggtgtgtggcacactcgtgtctgtggccgtgtgctgagatccgtgtttgggtgtggacatggcacactcgtgtctgtggccgtgcgctgagatgcgtgtgtgggtgtgacacactcgtgtctgtggctgtgcactgggatgcctgtacaggtgtgtgtgggcgtggcacactcgtgtctgtggccgtgtgctgagatgtgtgtgcgggtgtgtgggtgtgacaccctcgtgtctgtggccgtgtgctgagatgcatgtgcgggtgtgtgtgggcgtggcacacttgtgtctgtggctgtgcgctagttcctcagtacttagtgttgctgtttttaggatcgtggctttcctagctgggccacctactatactatgagtctgtatttgtgttgtttttttttttcttcgaaaaccatctgtaaccattgtttttatcattttattttattttttaagttttatttatttttttgagacagggtcttgctctgttaccccggctggagtgcagtggcatgatcatagctcactgcagcctcaaactcctgggctcaagcaatcctcccacctcagcctcccgggtagctgggactacaggtgcatgcaccatacccggctaatttttaaatttttttgtagagataaggtgttgctatgttacccgtgctggtcttgaactcctggcctcaagcgattctcccaccttgacctcccaaagtgctgggattacaggtgtgagccactgttcccggctgtattattttaaaaaagaataaaaccttaactttaaaagaccccatccctgctcccgtctagggtgtggagtggtccctgagccctgtgtcccccacaaaggagccccacagcctcggggccaggagggcgcctgcaaaggccccaggcgccatctgtggccgtgcccgctcaccttgggccaggacgtccgtctgtctggccggctgctggggaagctgtatgtcggctcctccccgcaggcctggcccaacccccccccccccccccccgcggctccccagggaagggagtggatcggctttcaccctcctggccctgccgcctgactgacgactctttcacaagacagcagagccatgacacccaccacctgcgtcagggaggctccgggcctcacaggtgacccacacagctccctacgcagttctgataaccttggcagcagacttgagaacttttagaaaatttcaagaggagaggtagaaagcgtagtatgacgtggccgttcctaaaatgtgggtcctgggcatcctgagacccgcttcatcgggcccaagaggtaaagctgtgttgagacaggaaggcacccccacccccagctcccagtgctcccggtctggctgtgcctggctggaggagcagcctgagctttctgggaagcacctcaggaccctccaccctttctttccgtcctcgggccctgcccaccctgggaggggccgtccagagcaaatgcccccttgtggtcctggcagagctgcccacaggtttccctggccacagtctagtgagttacagagattcatgttactatgaaaatgatttccattcgggccgggcctggtggctcacgcctgtaattccagcactttgggaggccgaggcgggcggatcacctgaaatcggcagttcgagaccagcctgggcaacatggtgaaaccccttctcnnnnnnnnnnnnnnnnnnnntactcaggcacccctacctccatctccagtgctcaggcacccccacccccagtgctcaggcacccctacccccagtacccagtactcaggcacccccacccccacccccagtgctcaggcacccctacccccagtacccagtactcaggcacccccacccccacccccagtactcaggcacccctacctccatctccagtgctcaggcacccccacccccacctccagcctccagtgctcaggcacccccacccccacctcccggtgctcccggtctggctgtgcctggctggaggagcagcctgagctttctgggaagcacctcaggaccctccaccctttctttccgtcctcgggccctgcccaccctgggaggggccgtccagagcaaatgcccccttgtggtcctggcagagctgcccacaggtttccctggccacagtctagtgagttacagagattcatgttactatgaaaatgatttccattcgggccgggcctggtggctcacgcctgtaattccagcactttgggaggccgaggcgggcggatcacctgaaatcggcagttcgagaccagcctgggcaacatggtgaaaccccttctctactaaaatacgcaaattatccgggccgtggtggcgggtgcctgtcatcccagttactccagaagctgaggcacaaaaatcactggaacccaggaggcgaaggctgcagtgagccgagacccccagtgggtccacaaaaatcactggaacccaggaggcgaaggctgcagggacgagacccccggtggctccagccagctgcctctgctctgtagccaccctctgtgcgtcctcccccgggtctccccactgcccttcgggggtgtccaccaggcactcactgcagccaggcggccgccattgtaatactgggcctcctgtgaggccgccccgcagaccccccgaggcctgggcaggggtgtgggagtggtttcttcatgggctcttggtgcatgaagttggatgtacccagtgggtggggggctgcccatgagggcctggggaccgtgagcggcttgctgggccccagccgggctgcagggatgtgggtgagcggctgctcttcctctgccaggcccagcccttcccgctccctcagcctcgctgccggggcagcttcccccatcacaaacaggtgccaggcgcaagctgcccaccagcacccacagccagagggcgggtgctgcccctggggtggaacgtgtgagagggtggtgcgggaatgtggccgcgtggcggggcaggcgggggcacccggaggctgatggctgcagagagcagcactggcgtgggcaggggcagcgccggacactctggggtctccctcacccacctcccttccctggccccctcctctgccactgcccagctctgtggggggcgaagtcctctcaggcaggcaccttggcccaggagtaggggaacctcacggatgtcttgaatgtgtcccctcctgtccccccactgtccccccgctgttcccccactgtcccccactgccccccgctgtccccatctccccgctgtctccctgttgtcaccccgtcccttgctgtccccccgctgtcccatccgccgctgyccccccactatcccccactgtttccctactgtccccctgctgtccccccaccatcccccgctgtccccccactgccccccactgtcccctgctgtccctccactgtcccctgctcttcccccgctgtcccactgtcccctgctgtccccccactgtcccctgctgtccccaactgtcccctgctgccccctgtccccccactgtcccctgctgtccccaactgtcccttgctaccccctcttgctacccccgtccccccaaggtctctcactgggctgaccctcccttggctccagcccttcaggcctcccttgccccgggctccatgttgagggacgaagcgctctgtctgcaggggtcaggacctgagacggcctgcagtgtcctccccaccagacggtcctggcggccgagttggggcctgcccaggtgcctgagcttgcagggctctctgccccatattagctgagccttgtgaaatcgccagcccccgccccctgcacccggtcctaggatgcgagttgtgcgcccgccaggtagagggtgattgccctgtcytgagcccatctggaggccagtgtgcggtggtcatagctgcaggtggggtcacggctgtggggcggcggttgcagccgcaggtggggtcatggctgcaggtggggtcatggctgcaggtggggtcgcgggtgcaggtggggtcacggccgtggggcggcggttgcagctgcaagtggggtcacggctgcaggtggggtcgcggctgcaggtggggtcacggctgcaggtggggtcgcggctgtggggcggyggtcacagctgcaggaggccatcacggctgtgaggtcaccggaggccgcaagtccgctctgtcttatggccgtggctctgtgcggggttcccgggacacccgggggcctgctccttgccatcttcaggtcctgggacgcagggagcgccttgtgcctgcccggagaacctcggctgaggtaatgcggcctccagggactgtgcggtggcctctgccgggctccatcaccacggtcgcgcccgctcgcccgggcctcgccgcctcctcctcagacctccatgtccgcctttgctggcgcaggccttgagatgctgccgggtgtgccaggagaccagaacccgggcctgggcggagcgctctggggtgtgccgtgcgccctgggtcctcccgtggtctcggttatggctctgcggccagtgtcttctcagggtctccgctttgccgtcgcgaacgtgggcacagcgtggcctgagctgctgagtctggctctgggggtcacgtcaaggctccacctaggggcctccgtgtccacatccgaaagtgcgggggtcacaaccctgctcggcgagaggacggcaggagaaccgggctccgaggacacagctccccatctgcagacggctcgggtctgagggcggagcgcgcgaaggggctccacacgacaggtgctcagggacccccagggggagggtccgcacagtggccagttctgaacatcaggaggctgagctgttgctgcacagcgtggggtgagaccctggggcgtccagccaggaagacggggacttcagcaggctcagaagaaagaggcgggaggcggccgcagttacccggactcaggagagagagacgggaggcagatgcagttacccagactcaggagagagctgggaggcggacagttatccggactcaggagagagctgggaggcggacagttatccggactcaggagagagctgggaggcggacagttatccggactcaggagagagagctgggaggcagatgcagttacccggactcaagagagagagctgggaggcggacgcagttacccggactcaggagagagctgggaggcggacacagttacccggttcctcggattctcccggatcttggtcctgtctgaggttctgccttcccagtggttgtcctgtctgggccaccagcaccttcatcgttctcttttacaacgactcccttgaagacctgatttcagaaggaagccacatcccctctgggtgtcagcgtgctgataaagcgcgggccccctcccaaggtgggaaccgtgtgacccccgcccccccaacccccacaccacgcatccctccagtcatgggactcgcgcccaaaaataaaaccaggcaggggacacgctctgctgcccgctggacgtttggctggcccgtggctctgaggctcggggtgggccgtgtcaccggggccgcgtggggagagggtctccggggccgcgtggggagagcgtctccggggctgcgtggcagagggtctccggggccgcgtggggagagcgtctccggggctgcgtggcagaggctgcgttggggtgttctcaggccccaagaccccacccagtgtcccactagggtttatcctggggattggggcagctggatgccccagagacatggcgtggtcacagctgctgcaagaaacggcggcggagtcaatgggggaagggtccggagggctcaggaccatggggtgggagccagcccttgggggcgtgggccctcggacaggaccgagtctgcaggcagggctaggggctgggggctgcgggagggcctggggatcggggcagcaggggttgtgagatatggccgaggacagggtgggaggcgatggggggctggcagtgggcggaaaggcagggctgtgggtcctgagggattgcagagggtgggcgttctcaggagtggcgggtcctgggggattgcagagggtgggcgttctcaggagtgggcacagcctgaagtgttgggttgtggggggacttggaartgggccccgggtgcagggtcgccccagcccggcacccacgcatccccttctgtctctggatgggcccgtcctggacagtgcatagtagtgggatcacacacatctgtgcctggcgtctctcacagagcgtgacgtcctcaaggtgcgtctgcgctgtggcctaggtcggcctcgctgctgttcatggctgtgtcgtgttctggcacgtggatgggccacgccacatgctggtccactcgcctatccgtggacactgggctgcttcctcgggtggctgttgtgagtggtgctgctgtggacgtgcatggccacgtttctgtgtggtgtggaattgctcggtggtgtggtgactccagcgttagcctcttgaggaatcccagactgccaagcagccgtgtgtgaggatccgcctccgcctccgcctcctggttttgggccctgactcttggttggttgtgcctggtgtccgcattgttctcctgcccccatcccctcccggtccaggtctccacaccctgccaggtccccaaggcatggactccaggtcacatgccatgtgtgaagccctccccttgaagaacccggtcccctgagcctcctggggttgccgcctggaaggggcgtccacagacgtggggggctcagagaccgtagggagggaggagctgccaggagcaccgtgctggcctaggggactcggacacaggcgagctcagggcccctgctgctggaggggtccctcagctatggtgtaccccgaggacggtcatggggtcgccccagagctgcccaaggtgccccctccccaagctccgtccaccgtggggcctgggccctgctgcccatcagctcaggactgtgtggcctcagagctgaggagcgccctgagtgtggaaaaggtcagcgtagctctggggctgtggctgccgtgagatggaacctgcagcaggaaggggtgctgacaggagctgaggggagtccctgcaggggaggggctgctgagccccaaggcagggggtgggccaccccctagcactggtgggcccctggatggggaccccggtatcagcagctgccttgggcccagcagagctgtttgtggccaccagcacacggggccggggtcggggggtcccaggctctacccagagaacctgtctcccagaggaacataccgaggcttggaggagcttgggtgtctgaggttattcaactcagaaggtggagccaggctttgatcctgcctgacccagaatctttgacaaggattggccaagaccccagatcccagcgggcctgtcccttcccctaaagggccgttctggcaagggtgtcgcaggtccccgtgggcagctggaagggcygccaagggtcccagctctggtggcagtgggttgtagcgtcctgactgcagggagcaggcagaggccgcggacagttgggacggcctggcagggtgacccccactgtgcctgaccacctccatctggtctctgggacaggagtcccgacccccagcccctgttgcccggccactgtctctggagcgccgggcagagacgtgcctctcccccacgggattgcacaagtgcctgcgtgtggctggacggcaattactggaagtcccggagatttcttcactccagggcttggccgggagtggccgccgcctccccttcctgccgccctcggcagtgagcatgctgggcggacgcctggaaagctttccctgccaccacgggccagcctgggtccctgcactcgccaggtagggcctggtgggggctcagcctggcgggcgtctggccgtgtgccagaggccgcggggcacgtgggagctgtccctggcgtctgatggtgtggggctcggctctgtagcccaggaacgttctcagtggggatgctggtgtgtgattagcctgaaacgaggtctgggtgctcttccagctctgcgtggcccctgacccccctccttgggagacctcactgtggagcccctgctgcctctgagggacagggctgggtccagtgtcccctgggctcccctgggtgccgggcccgggttggactctccctccacagtctcacaccggctgctgacaaagccagatgtgggggagtcagcctgcagctccactgctcacagtctgggtgcctggtcctacggctgccctgtgacctgggcagccctgtcgggcccaccttaatcgttgtagttggggccggggaggccaggaaaggcgctgtgggcagcacaaaggagttgggtggcactgctgatggcgggtgggggtgagtggggaggggaaggagcsccttttggttccggcccaggaggtagcaggagctgcagcccaggctgggaccggtcatgcccgagggagaggcggccggggagcaccactctccaccaccgttggactctcaggacgtccccgtctccctctgcagatcatgatgctgccgccaycgccgccaccacggagcgagaagcccagatagacgccccggcggccccgggtcctggagtcccgccgcctgctgcccggccgaggaccccaccccgcctgccgcccgatgcttgcagtggggcccgccatggacagggattacccgcagcatgaacccccgccggcgggcagcctcctgtacagcccgccgcccctgcaggtgagccccacccccggccccggcccacccgacggggtccacgggcacttgccccgctccgagtgcccggggtcacgtcgtgcggaatgctgccccagtggacgcggcgtgayctccacctgaccttcctggcccggagcccggctccaccygcccccgtgggccctggagaagggtccccatggggatgtgaatgggaggctactcatggccccagcttttcaagaagcacatttgaggagattctccctgctgcagagcttccagttccttcgccgtcagctgtagggggggctcaactttacttgtaggaacctgtcagtgagggaattacttaaaaaatatgtttctggccaagtggctcgtgcttgtaatcccagcactttgggaggtggaggtgggcagatcacctgaggtcccgagttcaagaccagcctggccaacatagtgaaacctcgcttctgctaaagataccaaacttagccaggcgtggtggcggacgcctgtaatcccagctactcgggaggctgaggcaggagaatcgcttaaatctaggaggcagaggctgcagtgagtggagacggcgccactgaactctagcctgggcgacaagagtgagactccatctcaaaaaaatgaaaaataggcctggcacggtggctcacgcctgtaatcctagcactttcagaggccaaggcgggcagatcacttgaggtcaggagtttgagaccagcctggccaacatggtgaaaccctgtctctactaaaaatacaaaaaattagcctggcgtggtggcaggtgtctgtaatcccagctacttgggaggctgaggcaggagaatcgcttgaacctgggaggcagaggctgcagtgagcagagattgcaccactgcactccagcctgggtgacagagcgaaactgtggctcaaaaagaaaaaaaaaaatttttaaattaaaaatatataaacgtgtatatatatatttatttttattttatttcattttattttattttgttttgttatttttaaaacacggtttcactctgttgcccaggctggaagtgcagtggtgcgatctcggctcactgcagcctctgcctcctgggctagtgattctcctgcctcagcctcctgagtagctgggaccacaggtacgcgccaccatgcccggcagatttttaaaattttctcgtagagatgaggttttgccccgttggacacgctggtctcaaactcccgggctcagttgacccgcctgccttgacctcccaaagtgctgggattacaggcgtgagccaccgcgcccggccctgcctggggatttacctggagacagaggggctgccctctcctatcaagcagcaggacctgctccaggactccagggtctcctgggtactccctagcccaacacccaggttggcctgtggggcgaacatcacagacacccctcggcagtccatcctcagagggctttgggcagcttcctgccatgttctgaccgtccagagggggctctgagcyggggccagggtacccctctcgtagcagggtccctgttgcggcccagacccctcctgtccccctccctagttcctgagtcccttggggttgaggctggatcctcacagctgccccggtggagctcgagtaccggccgtcggtcagcctcctgggccaccataaaggggactggccaagccacatccccaccggaacagctccatcccccgaaacccgccaggagcttgttccgatccaagaattctatctcggaaacacaccctggggactaatccaggagggaggggaagacagagcggcactatttatagtggcaggaaactggaatctccccagaggctctacrgtggggaaataattaagcgaattatgggatgtggagacagaggagccatcttcaaggatccgagcgggagcaggaaggtgttagcagtgacagtcggggaatgcgacagggctggaacccggcgggggcactggacaccagccacagggctcaggccggggcgcacccgtgcgcgtaaccggctttgctccccatcccgtgtgtgaggctcatcccaccctccctgttccgggttccgtcacattcgggtacgtcatggacacctctgggcagggtcgactgagttcgcacacgcacagcccagcctcttccagtgcccagagtattcaattagaaataaaaatacaccggccagcacaatggttcacgcctgaaatcccagcactctgggaggccgaggtgggcacattgcttggggtcaggagttcgagaccggcctggccaacatgatgaaatcccatctctactaaaaatacaaaagttagctgggcgtggtggcgggcgcctgtaatcccagctacgcatgaggctgagacaggagaatcgcttgaactcgggaggtggaggttgcagtgagccacgatcgtgccactgcacttcagcctgggtgacagagtgagactccgtctcaaaataaggaaaggaaagaaaatcaccaggcaggctctgattgtctgggcagggtcaggtgcccatctctggaccaattatgtgctaggacctgccatctaaaggtgaagccacaccctctggctgccagagaaggtcccagggaagactctgattggcctgccatgcccatggcacccctgtggggtgggactcgggtgtgtgtggatggcaggtctcagaggagccatgggctgtgggagggaggagactagggggatagaggcagtcaggactttccccccgtcccatcccctagcctggcctgggtacaggtggagcatgttgggtgagccagggacccctggatcctcccgccctgcgaccccaagccccccgcccccttcctgcagctgcagttccctggccgtggccctgcccagcctggcccaaggcgccgtgtgtgcctgagacggactccagctcatctgaggaggctgggttggtctggagtcagagttctgttccagaatgttccggatgtgccacatggccttgggaagttcctgtttctctccagggctggctttctctcttcccaaaagggcaggaggaggggaaggatcaggagacccgggctctggagcccctgtggctggtggcccggcttcctgcaagccacttgcacggggtcttctcacgggtgcaggagctcagggtgcccaggctgccggcctctgtgcaggggaggagctgtgggcttttgctgataaacttattttatgcaaaagctggaggagcggggcagcggtcaccccgagggctttgcctatctcgaggctgtcgggggtcctggaatcccccacccagcacctgcgggtacagaaagtggcccccggccatccgggctggttcccagccagtgtgaggtgaatgaggggcagaggtggccgagccccagggaattgcatcagggcctcatagaggagcagggctcacgtgggcctgggagaggtcactgggggactcagggaagcaggcgaacccccaaccctgttctggaagccagcgtggcccccagtcctgctgggataagcaggatgatgcccccggctggtggtgtctcccccatgaccacgggggcgtccgtgacggcagggtctcccccgtgaccgtgggggcgtccgtgacggcagggtctcccccgtgaccgtgggggcatccgtgacggcagggtctcccccgtgactgtgggggcgtctgtgacggcagggtctctctgctgcaggtgaggttggccctgtgcaggtgggggccctgctgaggggtgcccattctgcagggcacgaggtgtccacagccctgcccccgaagccgcaggtgctgaccctgggcccgctgccgcccttgggcccgctgctgccccgtgtgctccccatcctcaggttttggggcctgccgtgtgcctcaagccgctctcattcccaagggcaggcatagtgaggttttcccagagaaccatggggtggggacatcggctcctggcgagggtgttgggtaagcctggcctggagtcagacccaccagagattcggccaacctggagccactcacgcctscactgacctcgggctgagcctccaggccactggtcaccatttcccaaagcaggctccccgcaccccagccccgtgcagcttctgagaagtcagggccccgtcccgcagcagcctgagcttcccgggcacatcagcttgtccgaggggcctggaggtggtgtgaggccctcgcctgccccaggccctgcccgaggagcccccgacacccaccctccaccacaggcagcgggtgcgcgtctccctcacgcaaacggtccgatcctccacctcctagaatggggcctccaagcagggtcccggggccagcggcacccccaggtcttgtgtgagatgcagactcccgggctgcgggcctgcacatggggctgctggtagagcaagacctgtgctgagcccttcacgcgggtggttcagtgccttcagaccacaccacaagccttgggtggggtcttgtgcaggtggggaaactgaggcacggggcagttaaatgactccccaggagataccagcaggggcgggatgggaccctgactgcrgggcctccctagcctctcggcctgtcaccctgcccggagggcttagccgggctgcaccgcaggtyctctgcttcccactcactgatgcccgctgtctcttctagagcgccatgctgcactgcccctactggaacaccttctcgctgccgccataccctgccttctccagcgacagccggtgagtaccgggaccctccccgcctggcycccaggcttgctcattctgaagtcacagttacaaacggagttctgggtgcagggcgcgagggcccaaagtcttgttgaggggtttggagggtggtgtgcacgtggtcctggaaggctccaccccacgggccaggtccaggctgagacccctgtttgtggaacgctgttttgtgatccatggcttccctctcctcgagagcccagcttggtagagggcggggaggtgtgggctatgggccaggggggcctcctgtggaggtgacaccaggatgggaaggggcgggaggttttctggggtgaaggagggtgggaaggggcgggaggttttctggggtgaaggagggtgggaaggggcgggaggttttctggggtgaaggaggatgggaaggggcgggaggttttctggggtgaaggagggtgggaaggggcgggaggttttctggggtgaaggagggtgggaaggggcgggaggttttctggggtgaaggagggtgggaaggggcgggaggttttctggggtgaaggagggtgggaaggggcgggaggttttctggggtgaaggagggtgggaaggggcgggaggttttctggggtgaaggaggatgggaaggggcgggaggttttctggggtgaaggagggtgggaaggggcgggaggttttctggggtgaaggagggtgggaaggggcgggaggttttctggggtgaaggagggtgggaaggggcgggaggttttctggggtgaaggagggtgggaaggggcgggaggttttctggggkgaaggagggtgggaaggggcgggaggttttctggggtgggtgaaggagggtgggaagggcacttttcccacagagggcagcagctgggctgggttctgcagggggggtaggagttggccaggcgagcagtcgagcaggctgtgcaaagggcttgggagcaggtatagccagagccttgggagactccaggagattgtggagcagctgtttgtggcccgggagtggagtggatgcttctttcctgctggtgtttgcaaacctttctatgcaggaggagagtggcccccaggcggtccctgccctgggagcaggtctgcccagggccgcctccaacccaaggcctccggctcccactgggcagagacctggacctgctgccagccctgctggagagaagcttctggagggagagcctggggagcctggcgggagggaaggaggccctggggacggcggccacccctctcccaagcrcaggagctggccaagggggccggagtggggaagggcagagaagcctccctgccagccacattttactcctgggatcatctggagagaggcgcccctgggcggggggcccccaggaccttctccttgctgtgtcctytgccatcctcagggtgacagggcrgggggttccgacctgagccctccctggaggacggtgatcctgggtttctgcccgtagcgctctcctccttcgaggcgggagtgaggtgtgggtcaaggggcctgtgtgtgggggagggatggccaggctggggttctgaatcgccagaatgaacccttagccgagtcctgctgatggagcggggagggcgggatggtggccctggatgtccccccgcccaccaggcggctgttccgtaggagctctgccgggctgtgtccagtgggggtgggagggcagccccaggcttgaccaccacccccctggaggcccctctgtatgtgcagcggggccatgggtcctgccgggctgggcacactccagtggggcctcgaggggcctctggctgcggccatgggggtgcaggtgtgttactgagggagtgggttgagcaccccatctcacctcccccccccccrtctccctccagcccgttcatgagctccgcctccttcctcggcagccagccctgcccagacaccagctatgcccccgtggccaccgcctccagcttgccaccaaagacctgcgactttgctcaggtaggagccccaggagctcaccgcgccgtggggggcagggtggagtctgggccgcccctccagctgccctgcgacctctctcgctcaggcctgcctgggactcagtgacctcggcttggcccctcggccgcagggtttacrgtggggcagtaggagcccagagatgtggcttggttttggggaagagccagtgactggcccttcgtgtcagcagtgagccccgcccagcccttggggtccctgcgagcatctgggcaatgccacagagggagttgcggggagggcggtgctgggagagatgcccttggcagcctttgcccccacggccctccctctaggcgggtccagacaccctgcacattggagtcccaaccccttagcagccacctgaaaacggaactcacataccaaaggaacagaactttccacctccttctccccagggtcgcggggaggctcccagcctcccactgcggcatcaggcggaccccacccccaccctcccagcctcccccttcggcatcaggcggaccccacccccaccctcacagcctcccactgcggcatcaggcggaccccacccccaccctcacagccttccccaaggggttcccagtgccccagcttcctctcggcagctctggagcacccagtgccacagagatcggcttccctgggacggttcggataccacagcctccgtgtgggacccggggccaggggctgctgctgggccggaccacatccagggcctgccggggagcgagggtcacctggtgctcagctcccccaagcctccgcttcccctgtgtaatgggcatgtgagatctgcctgggcctcagagctgttggggggatgggcgcaagccggccagatccagagagaagcggtcaggtgtggctgcagcagaatggagccaattcaggtcccagggctcacccagacccaggccctgcaaacagctcgccgggtggaccccgggcccagttttccccactcagggccgtagcagagcggggcaaagccagccggaccctgagtctgtgctggggtgaccgcgtccgtcaagtccgcctccccagyagagtctgtgaggggaccttcctggaaagtagggtctttttggatgtcattgggtagggatcaagatgrgatgaggtagctctgaaatccagcacaagggtcctcagaagagacaggagagatkgggagctggcgccacgctggaggccggggctggggcggtgtggccacaggtcagtttctcctggagccccagggctggaagaggtgggtcagagctgtgggagggagcaaggccctgagacaccttggcctcagactcccgggccctgggacgggaagagggtggattcctgtcctgtagcccccagtgtgtggcctggaaattggcctaccagctgtgttcaggggaggggggcgcccctgctcatcttggggctgaggtcagcgaggtgcgcacaggggctctgtcctcacccgcagtagccctggacccccatgtgatctggtcctggccaaggtgtggcaagctgctgcgccatgccagccggacacagaaggaaactgaggcaggggaggcgcctgtccagagctggcatctgtgccccacccttcaggggacgcacaggggaggagcccggggtgcgactgatggcagtggctccttcctcaccgccactgccttcctaccagccccagccctgggtcagcctgtccttgccccgcccccttcttctctttcaccccttctctgcctctttctgtgtgttccttctctctttcctttctttctttytttttttttttttttgagacagagttttgctcttgttgctcaggctggagtgcaatggcacgatcttggctcactgcaacctccgcttcccaggttcaagcgattttcctgcctcagcctcccgagcagctgagaccacaggcatgcaccaccatgcctggctaatttttttttttttttttttggtagagacagggtttctccatgttggtcaggctggtctcaaactcctgacctgtggtgatccgcccgcctcagcctcccaaagtgctgggattacaggcgtgagccaccgtgcccggcctgtctctttcttttctctgtctctctctctccctcttccccctgctcctagtctctctctctgtctccctccctctcaatctctctctgcctatctccctctctgtctctgcctccctctctgcctctgtcttcctctctgcctctgtctctctctctgcctctgtctctgtctccctctatgctccatctctctgtctccctctcagtctctgtctctgtctccctctttgtctctgtctccctctctgtctctgtctctctgtctctgtctcyrtctccgcctctgtctctctgtctccctctctgtctctgtctgtgtctccctctctgcttgtctctgcccctgtctctctgtctccctctctgtctctgtctctctgtctccctctctgtctctgtctctttgtctctgcctctgtctctctgtctccctctccacctgtctctttgtctccctctctgcctctgtgtctgtttccctctctgtctctgtcgccctctctgtcttcgtctgtttccctctctgcctctgtctctgtcgccctctctgtcttcgtctgtttccctctctgcctctgtctctatgtctctatgtctctgcgtctctgtctccctgtctctgtctctctccatgtctctgtctctgtctccgtctccatctctgtctcatgaattctcctgctcctcccctcctgaacaattgctgctgcatctgttcagcccggagccctcggggccactgtgctggttctgtgagcaccgcccgcccggctccctgcccaccctgcctacagccgcctcatgctccagcgtccgtatgtggggcagcttggacccaaatctccctgttaaagcagcagaacttcatttggaggaagtctgaccccggtgccaagtgtgggccgggccgcgtggtcccccagtgctgagtgtgggatgggacgggtgtgggtcagctcagtcctgtgggctgggccgcaaggttctgtggtgtcgagtgtgggacgggatgcgtggtcccgcggtgccaagtgtgggacgggacgggtatgagtcagcccaggcctgtgggctgggccgcgtggttctgcggagccaggaaggagcccagacctgagcctggtgttcgaggccctttgcgccgtgccccccagcgcagcccagccagccacggaagcctctgctcccgactcagacctgaggaaatgtgctggccacacggttacagcctccaagacgtccccgtcctgatccccaggacctgccgccgtgtcgcctctcatggcagacgggacctgcagatgggactgagtgatggacccaagacgggagagcttcctgggtgacctggaggcccagtgtcctcacagggacctgcagatgggactgagtgatggacccgagacgggagagcttcctgggtgacctggagacccagtgtcctcacagggccctcatgagaggaggcgggagggtgagagccagagagagacgggaagagcctgcgctctggccgtgaagggggaagaaggggccccaagccaagggatgcgggtgcctctggacactggaaaggcaggaactgggttttcccctggagcccccgggagggacctgccctgcccacccttgatgttacaagttctgccctccagactgtgagaggataagtgtgtgtttcatttatatatttttttaatttttatttttagagacagggtctggctctgttgttcagcctggagtgcagcggtgcaatctcggctcactgcagcctccacctcctgggctcaagctcccacctcagcttccccagtagctgggaccataaggacacaccaccacacccagataattttttatgttttgtagaaatgaggtctcactgtgttgcctaggctggtctcaaacttctgggctcaagcgattctcctgcctgagcctaccaaagcatggggattacaggcgtgagccaccatattcagcttgttggagccatgaggttgacagtagcttttcacgggagcgaggggaaacggaggcaccgttcaaagccatcgtgtgacctgtggcatgtgtgcattccctgcaaatgtttcctgctgttgtataaacctggagggattggtagggagaacctgttcctgggctgggagtgagggtgaatgtaaaaccccacaggccataacgagacagctagtcatgacttttttttctggagaccgactcttactcttgcccaggctggagtgtagtggcgccatcttgggtaactgcaacctctgcctggcgggttcaagcgattctcctgcctcagcctaccaagtagctgggactacaggcacccaccaccacgcccggctaatttttatatttttagtagagatgggatttcgccatgttggccaggatggtctcgaactcctgacctcaggtgatctgcccgtctcccaaagtgctgggattacaggcatgagccaccgcacctggcctattgttttttgagacggagtctcgctctgtcacccaggctggagtgcagtggtgcaatctcggctcactgcaacctctgcctcccaagtgtgagccattcttctgcctcagcctcccgagtagctgggattataggtgtgcgccaccacgcctggctaatttttgtatttttagtagagacggggtttcaccatattggccaggctggtctcgaactcctgacctcaggcgatccgcctggtaactattgatacacctgagccctgagtttcttggcagccagagcaataggagaaagcagatgagccgtggacccgggcagtgcctggggccagtggactccgcagcactgttggttctgctggagagccttcacggcctggggagggaggccactgaggggcagattgattgtggggagggaggtcattgaggggagggttgatcgtgagggaggtcattgagggagggttgatcatgagggaggtcattgagtgagggttgatcatggggagggaggtcattgagtgaggattgatcgtggggagggaggtcattgagggagggttgatcatgagggaggtcactgagtgagggttgatcatgaggagggaggccattgaggggagggttgatcgtgagggaggtcattgaggggagggttgatcatggctcacctggtggtcttcacttcacagactccgagtagggccactgtgcctgggagattctgcccctgggaatgcaggaggtcatgtttgagtcaggactgggcacggtggctcacgcctgtgatcccagcactttgggaggccaaggcgggaggattgtttgagcccaggggtttgagaccagcctgcgcaacatagtgagaccctatctgtataaaaaatagaaaaaattagtcgggcatggtggtgcaagcctgtagtcccagtatttgggtcccatctatttgactgaggcatgaggatcgcttgagtctgggagttcccagtgggaggcccattgtgtttgtccgtgtgtccgtgatggatgcgtggagggccccactgtgtttgtccgtgatggacgcgtggaggggcccactgtgtttgtccatgaaggacacgtggatccagcctgggcaacataatgagacctcatctctatacaaaattaaaaattagatttacaggtcaggcgcagtgctcaagcttgtaaccccagcactttggggggccaaggcgggcagatcacctgagcttaggagtttgagaccatcctggccaacgtggcgaaaccccgtctctactacaaatacaaaaattagctgagcatggtggcgggcacctgtaatcccagctactcaggaggctgaggcaggagaatcacttgaactcgggaagcagaggttgcagggagccgagattgcgccactgcattcgagcctgggtgacagagcaagactctgtctaaaaaaaaaaaaattacaaaaaaattgcaaaaactaagagcttgttggaccgggggagtcagcagcctctgcgcttgcccccgaagaggcagttctccagggtgcctcttctccggggcgcgtgttctccggggcgcgtcttctccggagtgcctcttctccggggcgcctcttctccggggtgcgtcttctccggggtgcgtcttctccagggtgtgtcttctccagggtgtgtcttctccagagtgcctctccgttggttttgtctggggttgtctcctgactggatggaggaatccctcagacggcaccatgtacrgtgcggcgtggaccggagtgcctggcgttgcgcgtgttgtgctgatgctggtaactttggccgcttggcggggacggggttccttcaccatccatttcctgtttctctcagcctgggggaagacccaaggctgagcagaggctggtcctgcccaaggcggggtcagcagcctctgcccgtgggagctgcctgcgggcatccctgctgcgtccgtctgttttccgtgtgccttctcctgctgacggctgggtctgtgtgggacccccaccccttccccgctctctgcctgctccctggccacccccacccccacccctggggctcacgctgcgccaggatgccgctgctggcatccaccgtgggctgcggggctcccgcggtgtcacgtgtgtgccttgcccggccctccagccaccctggcccggaggaagggcccccctcacttctgctcagccttccgtctccaggttggcgcgaagccatcaggctcaatgtccctggtgggtgatggctcagccccgtgtgtcctggtggggccccctgccgcggtgtgcaggtgaaccgtggttctgtggacacgtggctctgtgttgctgctgctttttttttttttttgagatgaaatctcgctctgtcgcccaggctggagtgcagtggcgtgacctcggctcactgcaaccaacgcctcctgggttcatgccattctcccgcctcagcctcccgagtagctgggactacaggtgcccaccaccacgcccagctaattttttgtgttttttagtggacacggggtttcaccgtgttagccaggctggtctcaatctcctgaccttgtgatccacccacctcagcctcccaaagcattgggattacaggcgtgagccaccgcgcccggcctgcatttcttctttattttctttctttcttttctgtctctgtttttctctagttttttgttttgttttgagatggagttttgcttttggtgtctaagctggagtgcartggtgtgatctatctcggctcatggcaaactctgcctcccaggttcaagcgattctcctgtctcagcctcctgagtagctgggattacagacgcgcaccatatttatttatttttgagacaaagtctcactctgtctcccaggctggagtgcaatggcacgatctcagctcactgcagcctctgcttgcctggttcaagtgattctcctgcctcagcctcccgagtagctgggattacaggtgtgcgccaccgcgcccagctgatttttgtatttttagtagagacggggtttcaccacgttggccagggtggtctcaaactcgtgatctcaggtgatccatccgcctcggcctcccaaagtgtcgggattacaggtgcgagccaccacgccccgccccttttctgtcacgtgagactcaattcacgtgacagaaaagtccccatttctaagtgaacgatgctgtggctgttacaaagtccagagctgttcagccatcaccatgtaattctaattccagatcattgtccccctagaggaggccctgtccccgtcagctgtcactccccatccctcccctgccccggcgcccacgcatccccttcccgtctctgtggcttggcctgtcctgcacatttcatagaaatgggatcacacgctgcatggcctcctgcctctggcgtctctcactgagtgtgatgtcctcaaggtacatccgagctatggctgggtcagagcctggctcctgattatggctgagccgtgttccggcacatgaaggggccccaccttgtttgtccatgatggacgcatgcaggacccactgtttttgttcatgatggacgcgtggaggacccactgtttttgttcatgatagacgcgtggaggtaccaggtaccacagtgtctgtctgtgatggacgcgtggaggggcccactgtgtctgtccatgtgtcygtgatggacctgtggagggccccactgtgtctgtctgtgatggacgcgtggaggacccactgtgtctgtccgtgatggacgcatggagggccccactgtgtctgtccgtgatggaggcgtggaggaccaactgtgtctgtccgtgatggaggcgtggagggccccactgtgtctgtccgtgatggaggcgtggaggaccaactgtgtctgtctgtgatggaggcgtggagggccccactgtgtccgtctgtgatggaggcgtggagggccccactgtgtctgtctgtgatggaggcgtggagggccccactgtgtctgtctgtgtgtccgtgatggacgcttgtgctgcttccacccgtggccgtcrtgagttgtgccgccgtgagcacgggtgcaaacttcccagtggacacgttttcgtttctcttgggctcatacccaggagtaggtatgggttgacagcagctgtgaatcgctgttagcagcgtccatatgcaggtccatgtctgtgtgttccaggcatgactgggtctggctggggggtgttgggttcctgctcgaggataaggggcccttgctgctgcagcccaccctctgtgcccagagcctcccgtgggtcccctgctccaggcccagcccagcctcgcggccccacccccaggctctccggcacctgtttctgtgtggggtgagtgtcccccagggcagcccctggtgcctcttctggtctcctccccaccacaccccagcccgagcctccccccaccgcaccccagcccgagcctccccccagcctgagcctccccccactgcaccccagcccgagcctccccccaccgcaccccagcccgagcctccccccaccgcaccccagcccgagcctccccccaccgcaccccagcccgagcctccccccaccgcaccccagcccgagcctccccccagcctgagcctccccccactgcaccccagcccgagcctccccccactgcaccccagcccgagcctccccccaccgcaccccagcccgagcctccccccaccgcaccccagcccgagcctccccccaccgcaccccagcccgaacctccccccaccgcaccccagcccgagcctccccccagcctgagcctccccccactgcaccccagcccgagcctccccccaccgcaccccagcccgagcctccccccaccgcaccccagcccgagcctccccccaccgcaccccagcccgagcctccccccagcctgagcctccccccactgcaccccagcccgagcctccccccactgcaccccagcccgagcctccccccactgcaccccagcccgagcctccccccaccgcaccccagcccgagcctccccccaccgcaccccagcccgagcctccccccaccgcaccccagcccgaacctccccccaccgcaccccagcccgagcctcacccccccagcccgagcctccccccactgcaccccagcccgagcctctcctccactgcaccccagtgccagcctcccccaaccgcaccccggcccgagcctcccctcaccgcaccccggcccgagcctccccccactgcaccccggcccgagcctccccccaccgcaccccggcccgagcctccccccaccgcaccccggcccgagcctccccccaccgcaccccggcccgagcctcaccccagcctgagcctccccccactgtaccccagcccgagcctctcctccactgcaccccagtgccagcctcccccaaccgcaccccagcccaagcctctccccagcctgtgcccctacacaggacattccccaggtcctgctcgcctcactgcccctcgcccatcccttgccgcctgttcctggggtgggggtgctccttcacccttcctgacatcacccagatcccttgcgtctctgctgggctcctggggctctcggcacccacagcccatccccattccccaggtgctgcccccttgcccaccacctgtcctgtgaggacctctccacctgccgggcatccatcccgggtccccatggggctgcagggaccattgggaacgcagctgtccggtaacaacactctctgcctggcagcccgggggcttctgggaagctcaggatgagctcacggctcagaaaagcgctttgcaaactctggctgctttcaggcagggaggcaggcagcattgactgttctgcagatgcgtttcagcaggggtcagatgcctcggcccatccggcaccacggagcccccacagttactggcattgggcaaaaaagagggagagagatgagggagcgaaggagggagagggagagggggatttcttacaggaagtctttggttcacacccagccaaggccaagaagagccaccttctgtcccctggtctgtgctgaggccacagcccccccgggaggaggagcctccgcccagggcctgggcaggtgcaggaggggccggcagagccgcccacagacagccttagagagggagactcagcaggaagctgtgcgccagggttcggccctgcccrgctgcagcaccagaagacactgaggcggcggccccagggcccataccaggcacctggccggaaccctgacagaagggagcccagtttcctggggagccgtgccagcctcccagggctgctgtgaggaagcagcacacacagcttcaaaggccaggactctgtcccctcccagccctggagccyggaagtccaaagtcaaggtgcggacagggccgcgctccttccggcccctccagcatctgggggatccgggcatcccctggctgtggccgcagggctgggatctctgcttctgtgtcccgtggcctcctccccgggactgtgtctccttcgaatgaggacaccaggcacagaacacccgctcggccagtgcggcctttttttttttaaccactcacatctgcaaggaccggattcccaaataaggccacacacacagcttccaggtgccaggacatgatcacaccattttggggacacagttcagctctgcacggggcactctagtgaccaggcctgctgaggggcccttctcccagccaccaaagactggcagtgtctaggaagtgccacctgtgccccacgaccacctggaagcctcttctgtctgccccccagccccctccaggaggagcccctcccatccccgtagcctgtttccctccctgtaatgcagggcagggttcctgtgagggctgaggcagcgggcattcagccaggcttacacggagccctcggtcagcgttgctgcgggactggtcagtgaggggtgcaccctggacagaggcggagggagagaccgggccacgggagcccaggactgggcgcggggcgccggaggtgggtggggtagtgcccagcaggtccctaggcggcgcacccctatcctcagtctgacctgctccagggaccctgggctgygctgtcacattggggcctggggagcaagtcggagtctgtgcttgttctttctgtttcgttgctttccaggtcttttaaaaactgagacaaaattcacataccacaaaatccactttatttatttgagacagtattttgctctgttgcccaggctggagtgcagtggtgtgatcataacttactgcagcttccacctctctagctcaagtgattctcctgccatggcctcctgagcagctgggaccacaggtgccygccaccatgcgcagctggtttttgtattttttgtggagatgggatctcactatgttgcccaggctggtcttgaacttcctgggctcaagctgtttgcccacctcagcttcccaaagtgccgggatggcaggtgtgagccactacgctcggccaaatccaccttttttttttttttttttttttttgagacagagtcttgctctgttgcccaggctagagtgcagtggcacgatttcagctcactgtaacctctgcctcccgggttcaagcaattctcctgcctcagcctcccgagtagctgggattgcaggtacccaccaccacacctggctaatttttgtatttttagtagagacggggtttcaccatgctggccaggctggtcttgaactcctgacctcgtgatccacccacctcggcctcccaaagtgctgggattacaggcgtaagccaccgtgccgggcccaaatccacactttaaaaaagtatattcacagagttgtgcaaccaccacctctgtctagttccagaacattccatcatcccacaggaagccccgttcccatcagctgtcactccccagcccatccccaccccctgataacctgaatgcttttcctgtctgtgtggattcctgttcaggacaggacatttcatagaaatggcctcacacactgcgtggccttctgtgtttggcgtctttcactgagtgtgaggtcctcaaggtgcatccgtgctgtggcttgggtcagagccttgctccttttcatggctgggtcgtgttccagtgtgtggacggcctcactgtgctggccctgttcctccgtggtgactgcgctgcaggagccaggctgtcatgagctgtgggtccacctgggagctgagggtccacccgggagctgtgggtccacccgtgagctgtaggtcctgtgagctgtgagtccacccgtgagctgtgggtccaggtgcctatgagctgtgagtccacccgtgagctgtaggtcctgtgagctgtgggtccacctgtgagctgtgagtccacccgtgagctgtgagtccacccgtgagctgtgagtccacccgtgagctgtgggtcctatgggctgtgggtccacccatgagctgtgggtccaggcgcctatgagctgtgggtccacccatgagctatgggtcctgtgagctgtgagtccacccttgagctgtgggtcctgtgggctgtgggtccactcctgagctgtaggttcaggcttttgtgagctgtgggtcctcctgatggcacgtgggagtgcagctgctgggttgttactccccattcgcctcttttgaggagctgcaggatggttcccaggccactgccccgcgtcctcagcagcgcttgtggttgtgggttttttgcgtggagctggtgtggagctgtctctgggagtggctgtgattggctgctgggttgagcggtggctgtgattggctactgggttgagcggtggctgtgattggctgctaggttgagcggtggctgtgattggctgccggattgagcggctccgtgggtttcttccccattggttgttttccattggcgggcggggtgcctggcaggcgggcccctcgccccagcggcacggacccgtgttgtcgcccagcctccaggaggtgatgggtcgtggcaaggggtgtgggcgacagtctgcaccagcctccgctgctgcggtgcctggtcgcggggccccagtggggctggcacagggcctcagggtctagaacagggtgagcccgagggggcggagtgcacagggtttgagggccccctggtcccactctcccctcagagccctggcgggagtcttacaagcccagaactgtcccgagccctccggcccagccacgggctcccctggcctctcggggcggtttccttctttcccagggcccctggccacagggccgggcccttcctcccctcacagaggaggagccgtggccacctgcgcggtctcggccgcggtctcgtgggcaatgcggcctctgccccgtcagtcgctgagtacaggcagatggggcccgtcctctccacagcccggccgtcctcccaccccctctggccctggggcctccccagctcctccaaggacaccgagaatgaccgcctgtggcccaatgtgaggtcccatcaggtgtctgccccgcggtgtctaggcccctgtgatgcgccagggtcctcacagtgcgggcaagagtgtggccgcgggcgggytcgcggcccggggttgccccagcaagtgcatcattgacacttggttttctaccaaagcgagaacgttcttttcccaggacgctaccacttgttcctgcccagggggccgaggccgggtctggccagagcctggagaggaggggcccaggctcagctctccctccgccagccccagatcaagggaggccacggggcccgctgaaccccctgggcacggacagcagggaaagagcagggaggggactttgcttcggcggcaggggcttctcggggacctcagcctgcaggggtggggtggggagagccccaggggggcgcagcagggcctgaggtgcgctyggcatgcgtggggtgctgggtgaagggaggcggtcttggccgcagtttccctgcctgtggtttgggggcaccaggaacagcagctggtccccgtggaacggaacccagctccctgcagtctggggagaccgaggcccatgcccacctgggcattctgcacgtccgccgggtgccccaaagggggctggtcctgcggcggggcacgggtggggktgcgtgttgacagcgcctgtgggagatccgccccgtacagtaattctcctcgcactgccggtaattgccctgacttacggggccggcatcatttcctgaaagtcagccccggccttagaggaagtaggcgccggcggcggtgactaaaccgacatgcaaatgcagccgggcggagagccgcccccgtccgccccggccgacccaatgctggggctgctgccgcggtcatgagggagccgctcccgggcagcgcttcctgggggacccctggccccccgagcgccgggaccatgtcccagctgcagctgtggctgcagtttgaggctctgaacaaggtaacactcccttcccggggcgggcgaggccctcgggggcaggggtctgggaggtgggaccccattcaggacggccgggccmcctgccggagcagccggcatctcatyctagagtccgaggccgccaggatctaaaaaaatccccaccccgccccgtccgtctcttctggcagtgagagggaatctgccggaaggttccgaggcagagatttaagacttcgggctgggagcggcgccctgtgcgtaggctgggggacccgagcggagtgggggggtcgggctcagccctgcccggacgggggccctcagtgacagtggcagtggctgtcgggagggctgcgtccccctccttctgcccctggggtaggacccagagctgtggctttcctctggagaagcctcaggtggaggggctctgggtgtcttatggggctcttgtagggagcggaggctgggtgggcctggtcagggctggctctggtggcgcaggccggcaaatccctgtggctctgtggctccccatgggtcctggagcacagggcagcggcagcacatcaggtctggagtcagttctggagtcaggtctggagttggctgcccagggcaggaggagctgtgtctgctgcttttgaagcgggcagagccaggtcctcccagccggtcctcccagctccccacctcagcccagggctcctgaaatgctacagagacaagaaccacagcgggcagccccggccctccctggggccccagaactgggggctggcggggagggatgcaagtgtcacccttgaggggccttggtgcttgccctcactacagactgcagaggggcccggttccctggggaggcactgggtccgctgagctgaggctggagggtgggtgggtcatgtggtgaaggatgcaggagcctgggccggcctggaggggctgtggagggacacacaggcgcgggtgggacttaggctgtctctgaggtgagctggtggctgctaggagtcaaatccagatgtgggcagaggacggagccactgtggggggagctggcctggctctgttcagcttcccacatgtgaacagggccagccctgggaaccccgtctccctctgtccctaatcgctgagggcacctgctagaagtgaaggcttcgagggctcatgcacctggtggggtgtcctgtgctgggaaggaccggacggggagcagggcggggcctcgaggctgcgttcttgaagcctgaaagctgcaagcactccctcattattagactttcacttttatttatttgtttttgtgacagggacttgctctgtcacccaggctggtgtgcagtggcacgatctcggctccctgcaacctccaccaactgggttgaagcaatcctcccacctcagcctcctgagtagctgggactgcaggcacatgctgccatgcccagctaatttttaaacgttctgtagacatggagtcttgctgtgttgcccaggctggtcttgaactcctgggctcaagtgattctttcaccttggctctaaaacagtaggattacaggcatgagccactacgccctgcttgacttttaactttttttttgagatagggtctcgctctgtctcccaggctggcgtgcagtggcgcaattatagctcactgcagcctcgaccacctgggctcaacggatcctcctgcctcagcctcctgagtagcagacgtgagctcccccctgcccgacttgactttaacttttcaaactgttttagaatgacagaaaagctgcagggacagtgcagagagtycccrtgcacccactcccgggctccctgctgttctatctcccgtctgtggctgtcacggctgatgaaccaacatccgtacgccaccgttaactcctgaggcccacgctttgcttggattgcctcagtttcccccatgtcctttcctgcccaggaccccacgtggtgtttaggcgtctcctcargcccctctgggctgtgatggtttctcagaggcccgtgtttcagatgcgttgggcggtcctggggctggtcgggtggtgtggatgccctggagtagtcgggctggtgtttcctcagactggggcaggagttttgggtggaggaccctgggcgggaggaccctgttgtcctgtcttcttgggccaagggcacctggtgagggcgtggggcaggtgtctctgcctgaggtcccttccctctgtccacgctgagctccggggaaggactggccgtgtgacccacgcatttgggtttggggagctctcctccgctctgcctgcgctccctgcaccaccaaggcctgggcggttctgggcccgatagcaactcacccccgctcctggctggggccttgaccaactcaggagcccctgaccttgcccgggaaatgcttccacggagggtccgggccacaggtcagcgtgaccaggccctctgcagcctgggtgggcagtgtccggagggccctcgtgggcctcagtgggatgaatgctccccaaccctgccgatcggggcctccagaggctctgggaggtggactgctcctaccctcctggggtggggggtgctgcaccctacctggctctgggcctcaggcgggcagcatggacacctctgtcccgggggtctctgtttgggggcaggttcctgaaggtccctagtgatcagtgcccaggtgcttgggtctgacagggtgggcagtgggcaaagctgagcaaggtgagggggacggaacccacagcttccagggagagacagcgcccccttgacatgcctggtttttttctttgtttgtttttcttgagatggagtctccctgtgtcacccagactggagtgcaatggcacgatctcagcccactgcagcctctgcctcctgagttcaagcagttctcctgccccagcctctcgagtagctaggattacaggcacgcaccaccatgcccagctaatttttgtgtttttagtaaagacagggttttaccatattggtcaggctggtcttgaactcctgacctcaggtgatctgcccaccttggcttctcaaagtgctggggttacaggcgtgagctaccatgcccagtctattttttttttttttgagacagagtcttgctctgtcacccaggctggaatgtagttgtgcagtaacagctcactgcagccttgacccctctgggctcaggtgatcctcccgcctcagccccccgagtagctgggactacgggcatgcaccaccacacccagctaatttttgtatttttagtagaaatggggttttgccatattgtccaggcgaatcttgaactcctggactcaagcaatcttccaccttggcctccaagtgctgggattacaggcgtgagacatcacatgtggccggacacggtggctcacgcctgtaatcccagcactttgggaggccaaggtggatggatcacctgaggtcaggagttcgagaccagcctgaccaacacggtgaaaccccgtctctactaaaaatacaaaaattagctgggcgtggtggcacgtgcctgtaatcccagctactcgggaggctgaggcaggagaatcgcttgcacctgggaggcagagggtgcagtgagacgagatcacaccattgcactccagcccgggcgacagtgtaagaatccgtctcaaaaaaaaaaaaatgaaatgatgtacatacatctccttcactgggcagcgcgtgtgtgtgtgtcatccccatggcgagccccacctctgggcgtggctgcccccgcccctgcctccggcacagggcatggcaccaggctcaccccagacccgagctgctcagagttcctgcagcattgctgcccttcaggtgctgcagaagtcagacgccgtcctgcgtggccctgagggttggtgtttctcacccattgcttgtttatttttttcttttttgagacggagtctcactctctcgctctgtcacatggtggctcacgcctgtaatcccaacacttttggatgccgaagcaggcagatcacttgaggtcaggagttcaaaaccaggctggccaacatggtgaaaccccgtccctagtaaaaatacaaaaamattagctgggcatggtggcgcacacctgtaatccctgctacttgggaggatgaggcaggagaattgcttgaacctgggagggccgtggtgtctcccattcccacrtgctccagtgtgtggagggccgtggtgtctcccrtccccacgtgctccagtgcgtggaggggccttggtgtctcccgtaccaccctcaccgggcctggccttgtcttccaggactcctcctattttgaggacttctccaacatctccatcttctcytcgtccgtggactccctgtcggacatcgtggacacgcccgacttcctgccggctgacagcctcaaccaggtgtccaccatctgggacgataaccctgccccctcsacccacgataaggtcagtgcgcccggtgcccccagccagccccgacccaccagcgtggcctccccagcccgggacccacacggtccagtgaggtctcagtctcccccactctgcgtgccaatggctgtgcctgtcactgtcggcgccatctgtggccatggatgaggtggttagttgagggtcctcttgtgtcctgaataggagaaggcgacgtccaggacatctgtggctaccacatctgggcggtgctcctggcatggagttggggggggccaggatgctgcccagcgccctgcagtgcccattatggccccacctgagagggaccctgccccgtgtccaccgcacccggggagtccctggtctagagaagcacaggaaggtgacgggacagagaagcgtggtcaggaagggccccctggagaggcagcgcccagcgggcccaggcaatgtggctgtccaggcagaggaacagcacctgtggtggcatccagccccatggtgcctgggtcagcagtggccgtgtccccgctagtggggagctgagagggcgaggttggtggatcctgtcccagggtggggagctggacattgtccgtgggggctgaggggctggggtttgcctccaagaagctcctgaaggacctgggtgggccaggcctagagcaggggttgtagggcagcagggcccccakgttcttcgggcctagcctctagccgtgccccagtgcgactcagtggaggtgtctggtgagggaggcatggctgggagccaggcctggcaagtcccttccccaatccgggcctgtccasgagagaagcttctagactttgggagcagacgttggacatgtctctgggactgagcgccttccggtgagggcccatgccagcctccgcacgctcccggcacagtggtgggctcacacccataggccgctctcccgggccctcaggaaggggcaacccgggcagcagaactcacgggcttgggggcccaggcaggaagcatcagggcaccccgcagccacggtgggtggctcacggtgggcggctcaggaagcatcagggcaccccgcagccatggtgggcggctcaggcttggtccctctggcacaagggcccagcagagcatttcacccagcccggggcccgtgccctcccagctagctcccaggtcctcagcagggcgtgaggaaagaagccagggcctgaccggcctgctgtggccggcacgagggcatctgaaacccaatgcccgccagccccaccgggaatggtgactcagccttccaggaacctgcgtggcgtctgtttttttgtgttttgttaacttaaaaaaaaaaggagagggcaactgagtataggtttctaaccttcctgtgccacgcttccactttctttaaaaaccctcaggagtgttcctagtgttagaaaatgcagaagctgtggactcagttcattagcatcactagcctggtggctcccacacactgccgagaacccggcccgggctcaggcaggcttgggcggaaacctcacccgtctcaggacgttggagttcaagggggggaccgggtctagaagagatgctcttatttatttatttacttatttattttgagacgggatctcactctgtcgcccaggctggagtgtggtggcgcaacctcagcccatttcagcctcgaccttctgggttaaagcgatcctcctgcctcagcctctcgagtagctgggtccatagacacacgacaccacgcctggctaatttttgtattttttgtagagataggattttatcatgttgtccaggctggtctggaaccctggccccaaaagatctcgcccgttctgcctctgcctcccacaggcctgagccacgcacccggcgggattctcccctttccaattcttcacacttttttttttctttttttaagacagagtctctcgctcttgtcgcccaggctggagtgcagtggtgcgatctcagctcactgcaccctccacctcccaggttcaagagattctcctgcctcctcagcctccctagtagctgagattacaggcatgtaccatcgtgcctggctaattttgtatttttagtagagatggggtttatccattttggtcaggctggtcttgaactcccaacctcaggtgatccacctatcttggcctcccgaagtgctgggattacaggcgtgagccaccatgcccggcccacgctcactttttttttttttttttttttgagatggagtctcgccctgtcacccaggctggagtacaatggcgtgatctcagctcactgcaacctctgcctcctgggtttaagcgattctcctgcctcagcctcctgatcagctgagattacaggcgcccaccaccacacctggctaatttttttttttttgtatctttagtagagacggggtttcagcatgctggccaggctggtctcgaaatcctgacctccactctgggaggccttggcctcccaaagtgctgggatttacgggtgtgagccactgtaccctgaccatgcttacgttttttatggctcgtattactgttaggatttttgctttttaagagtggatatattccagaatcacacagaccctagtttggaccctaccatcccccagccatccgtcccggggtccacactgtctcagtgttggcgtctggacagtgggcatgacgacgggccacaccaccccccgacccacccgttyacaggctttacacgcccagtcagttcggagaccccysggtgggccacagactcatccagaggcccagcacacctgtctgccaaggcctggggtcagctccccgaggacagtgtcactgcccaccctggtgaatctgcatgaggctccgggcagtccttctccccagggtggggccgcagtgggatgtgttctctggtcactacagtggcaggcatccttgccccatctctcacagaggagstgctgccctcgaggggcctcagggactgcacccacgggggttcttggagagtgcagggctgccctgggccacccaccctgtgtgctgggagccatcgggtgagggacaaggcccaggcccgcccgcccccactgcctctgtctcctcttccccctcgacagggagctcccaaccccttgtctcccaggcccccgagggcctcctgcactgcatggggctggcacacagtgggtctctcctgtcagacccctgtccacagccttcctggcagctcccgcgggaccaagctgtgttgtctgtcagaactagccgggcaccttcctcccgggcactccaggcaggcacactggccatcagtgagaaggcagccaggtgctggccaggaggagcgagccttaggccccagggaggtgcccactggggaggcttgggaggcaccagggtcaccctgagaacagcaggagagcaagacccagggccctggggagcgaggatggggaggcgaggacggggcagtggggagcctccctctggtggccaggctgcgagggcccaccagctgtgacctgtcccgtcyggcccgggctgacatcctgctycccttccagctgttccagctcagcaggccgtttgcaggcttcgaggactttctgccctcccacagcaccccgcttctcgtcagctaccaggtgagctgggcccagccgagagctccctcccctgccctctcatgggacctaaggagagggctcagcacaggcatctccattgyggggagcgcttggctggcctagaagctgggagtgcccattttatagctgaggagatggaggccctgggggagcaccttgctgcaggggcagacagagccgtctcccacccctgggtcactcagctgcccatggtcagcctggcccctgcccctgggggagcccagtgcccgcggccgctcaggcctgcagtctccrctgagctccygccacgcacgcaggagcagagtgtgcagagccagccagaggaggaggacgaggctgaggaggaggaggcggaggagctggggcacacagagacctacgccgactacgtgccrtccaagtgtgagtgrccyggctgcacccagccctgggacaggttcaaacccttttgtgggaccgagaccctgcaggtgaccaccgcccgcacagcccacagagggaatgtgaagcttcagggagggccggagagcccggggacaggttctacaatccaggcktatacaaaaccggggttcgcagaggggagaagtggaaaggaacctcagaggcactgggaggatttttatgcatttgcccctcctgcaagccgctggycacgcccccaaccaacccagcaggccgcggccacacccccgacccggccagccctgaccactcctccacccaggcattcctggccacgcccatgacccgcccaacgggacctggccacgcccccaaactgccccgccagctctggccacgccccagacccgcccagcgtgccataaccggccctggtcaccccttggccataccctttaccttgccctccgtccttgctcctccagccaagatcgggaagcagcacccagaccgcgtggtggagaccagcacactgtccagcgtcccacccccagacatcacctacaccctggccctgccctcggacagcggggccctgtctgccctgcagctagaggccatcacctacgcctgccaggtgaccgcatgtccccaacccagcccagcctgtgtccgcgaggcccctggggaggggccgggccagcacccccaggccctgacgcctgctctccggcaacagcaacacgaggtcctgctccccagcgggcagcgcgcgggctttctcatcggcgatggggccggcgtgggcaaaggccggacggtggccggagtcatcctggagaaccacctgcgcggccggaagaaagcattgtggtgaggccctgcctggggcagggggcgggagcgggggtggggggcggaagcggggggcgagggggaagggtgggcgcgcctgacgcccccaccccgcaggttcagcgtctccaacgacctcaagtacgatgcggagcgcgacctgcgggacatcgaagccacgggcatcgcggtgcacgcgctcagcaaggtaggggctgtgctcggcaaagtagggggcaaggtggggaccgtgccctgcaaagtgggggctgctcagctgggtgggccagcagccagggcaggctctgcccagcacccttacagatagggagacccaggtccagagcctgctgagccggggccccattccacacctgttctgtgcatccccagatcaagtacggtgacaccactacctcagagggcgtcctcttcgccacctactccgccctgattggggagagccaggccggcggccagcaccgcactcgcctccggcagatcctggactggtgtggggaggccttygagggcgtcgtatcctgctgggggcaatcgggaggggagggctggattagggggtcggagggaaaaggaggatggaggagtgggagaggaggggtgggagtcaggggagaggagggcaggatgggagagggtaggagcggaggggtggggctggggaagggctggaggccactggagctcactaccctggatgtggccacccagcccccagctttgctcagggtttaggactccggatagaagayttttctggtccygggaggctggccctgtgggtaccacacaagtgaccatcatcattcaccacagggctccggcttggtttcttggttctgataagtgggatgagtgaccatagatgtggtcstgatgtttgccatgatgccgtgggcagagggtggccactgagctgctccccaagtcaggaaggtgccaaccccagctgatagtgtggtgggcacagttcactccccagcatcccagggctctcgtcggcaggctgcggttcggaggggctcccccacaggagacccaggacagttagcagcaaaggcacggcagggcaccccttggccaggctcagccctggtgctcggccctgcagggtgcaccttgggtgttggggtgttgggagcacaggctcagataagggagggacgttggcctgcagcatccacttcatgcacaggacatggccatggctttgctgttcagttaacgccgagacacagaacattcagactggccagaaacagaacgggagactgctggtgtcttcgcacccggctgaacaatctatgtgcaacaatctacgaaatagcgataaccctgagatcatacctcgctgagctgctacgtggcggcagggccggccgtttaatttgtattctcccagttttccttcctcagactgctttcctggaacttggctttctttcgtcttaaaatattaagaacctggccgggtgcagtggcwcacgcttgtaatcccagcactttgggaggccgaggcaggcgaatcacgaggtcaggagttcgagaccacctggacaacatggtgaaaccacgtctgtactaaaaatacaaaagttagctgggcgtggtggtgcgcacctgtaatcccagctacccgggaggctgaggcaggagaatcgcttgaacccaggaggcagaggtggcagtgagccgagattgccccactgctctccagcccaggcgacagagcgagactgtgtctcatctaaaaaaaaaaagagttccagactgtcttgaccaatatggtgaaaccccgtctctactgaaaatacaaaaattacccgggcgtggtggcgcacacttgtaatcccagctactcaggaggctgaggcaggagaatcgcttgaaccagggagtcggaggttgcagtgagctgagatcgcgccgctgcattccagcctagtgacagagcgagacttcgtctcaaaaaaaaacaaagaattagggctgggcacggctcacacctgtaatcccagcactttgggaggctgaggcaggcaggtcacttgaggtcaggagtttgagattatctggccaaccaaacggccaaccccgtctctaccaaaactacaaaaattagccggttgtggtggtggcacacacctgtagtcccagctccttgggaggctgaagcaggagaatcacttgaatctgagaggcagaggttgcagtgagctgacattgtatcactgcactccagcgtgggtgacagagcaagaccctgtctcaaaaaaacaaacaaaaaagaaaacaggttccaggtatcctcctccgatggcaacrtcctgcgatatcatggtttagggatcccacccttcctcgccggaggccccatcctcggtgtgtgttgtttagagtctgggaggagccatcccaggccacacccatctaatggtcgtgtgggggccgcctgcccgccygccccccatggtagccggctgccactccgacctgggcttccctcgtggagttctcagccgcacaggcgtttgccccccaccaggaaggtgsggtcttgggtggtcaggacctgggctcctggggtcgcccccgtccttcagaatactccttaacccacgtgtgcctcagatcgtgttcgacgagtgtcacaaagccaagaatgccggctccaccaagatgggcaaggcygtgctagacctgcagaacaagctgcccctggcccgcgtggtctacgccagcgccacaggtggggcggtgcggatcccacgtgacccmcccgcagcagcgtctttctgcctggctgtccccgcgaaggggtatcccacacgcgtactcagcctccgtctgcaccctgctcctcctcggacactgrggcacctctgcgcctgtcccaaggccacgctggctctcttcaggcccatggctccaaccccgcagggcccctcgtcgggcggtcccaacttagtcgtcccctgacgcggcctctgggccctcccgggttggggagctgacggcagcttccccccacaggtgcctctgagcctcggaacatgatctacatgagccgcttgggtatctggggcgagggcacacccttccggaactttgaggagttcctgcacgccatcgagaagaggtgagtgcccttctcacccacgtggaggggcggcggggggtggggaggaggcctcaggcccatcagcccaaggcctggcactgccacgtgtgcttccccagcacccagaggtgctgaatgtgsgtcgctcgtttcactgcctcgggctgcccagcactcccagggaagccagcccctccgcagcccttcctgccccgtccccgccaggctcagctgccaactgcctcagtggccgccagggctctgctcctgccgaccccgccctctctgcgactggctctgcctcgcgctccgagtggctccatccccacgggctctggccgtgctcacgggggctgtgtccatccgcaggggcgttggcgccatggagatcgtggccatggacatgaaggtcagcggcatgtacatygcacgccagctcagcttctccggcgtcaccttccgcatcgaggagatcccgctggccccagccttcgagtgcgtctacaaccgcgcrgccctgctggtgagcctgcgcacccgacccggggacccctgtgcgtttcccgggtgaaattgctcccccgtggccttgcagatgccacaggcgtcatcaggtgacggcccgccctgtcctgtcctggggtttttttttttgttgtttttttgagacagtctcgtgctgtcatctaggctggagtgctgtggtgtgatctcagttcactgcaacctctgcctcttgggtttaagcgattctcccccstcagcctctcgagtagctggarytacaggtgcccgcctccacacccagctaattttgtgtattttttggtagagaacrgtgtttctccatgttggccaggttggtttcaaactcctgaccgcaagtgatctgcccgcctcggcctcccacagtgctgggatgacaggcgtgagccacgtgcccggccatcactggggtttttatgtggctgtgataacgagggatgggaccaaaccaccgccccccttcctgtggtgcccaagccctttgcccccaggtcctggcccacagctggcagttggtagccgtgttcagcatccacattgctgtgggccatgtggcttggtcgttccctccatgtttggacaggtcctgttttctccccctcacgcccaacagccctgtatgttcgatggttttttttttttattttttgagacggggtttccactcttgttgcccaggctggagtgcaatggcacgatcttggctcaccgcaacctccgcctaccagattcaagcaattctcctgcctcagcctcccgcgtagctggggttacaggcatgtgccaccagcccggccaattttatatttttggtagagacaggatttctccatgttggtcaggctggttggtctcaaactcctgagctcaggcgatctgaccgcctcagcctcccaaagtgctgtgattacaggcgtgagccaccacacccagcctcttcactcgtttctttaggtgacacaaccagcatctcccgtaacccccagggccgggttgctctccggggtggggccgtcctgagcactttggggtatggagcagcatccgtggccagagtcccagccaccctaacccagcccacccagtcatgccgggaccagcccccaaacctgaccaccacagccagccccagacatgcccagtgtcccctggacaggatcacacctgggtgagaccctggtccaaagcaagagaggcgtggctgcgagcaccctgtgttcttggaaggagctgagcctgtttgccgcgggcgcggagtctgtgcagtttgcagcacggcttccccaccacgagtgttttggtttttcaggtttttgccgtacaggtagaggcagtgcctcttacagtgcacacccccagcacccccatcctgccctaaattccacctggcgtggggatgccttgcccagggctggcggcaggtgggccggggcccgggtcgggagccaggagccacagctcrggggcgccttgtgacgtgtcattgcagtgggccgaggccctgaacgtgttccagcaggcggcygactggatcggcctggagtcgcgcaagtccctgtggggccagttctggtcggcacaccagcgcttcttcaagtatctgtgcatcgcagccaaggtgcgccggctggtggagctggcccgagaggagctggcgcgagacaaggtgagcggctgcggccttcgagggctgagggcggccgggcctgcaggggcggaggctgctcttcttccaggtccttcctggcccctccccagacgtgggcgggggctgcaccctggtgggtgagagacgcccggatgtccgtcttccaatcagagccagccagggtgtcagaacagcggagtgtgaccacacagtgggcagctcaccatcccgagacaggcagccggcagacccccacccagcagtgtgtgttgtaggggggccgtggcccctcctggggaggcgagcacagcagcagagtgagggatgtggccrtcaccccaggcctggcaggttctggccccacagaggccccacagcagggctggtrgmtcacagtcctctgcygtcccacagtgcgtggtcatcgggctgcagtccacgggcgaggcgcgcacgcgggaggtgctgggggagaacgatgggcacctcaactgcttcgtctcggccgctgagtaagtgtcacggtggggacaggactgtgggcttcctgcgctcatggccacccctctctgtggccacctgtggcctgaccctgccccttggccccagcagcaggaggtgctggggtgggctttgctgggcccccagcctcagccacagaggccttcaccgctgctccaggtctaaagcagaggcttggaggtggaccccaggcatggtgggcctggaaggtttgggacatggtctccaggggtctcagaaggaggcttcctgcatctgtgccgttttaacaagggggctgtggattttaggggctggccctcccagctgtctgaagccccagcctctcccctgttggttgagaatgccccgggagggtcacagcagcccccctagatccccccattgcctgggggtcggagctccccaatgcccccagctaccccttcaccctgccccctgcccctgtcctgggagccatcatcatatccggccacattcctcagagcgggggaagcctggtggccgaggtggccctgtgacaccaggaggccagaggagagctcacaggcagcccccagtcctccccagcccactccacacaggagaccctctgcccaggcccggtcctgtccgggacccccacagggacccaggggtgcgtccagctcctggagagcaaccccgcctggcctcagctcctcgtgtgagaataaactccrcgtctcactttcagaggcgtgttcctgtcgctaattcagaagcactttccgtccaccaagagaaagcgggacagaggagcgggcagcaagcggaaacgtaagccctgccccccatggccccacccacccctgcccctctgctttctccccccgggggctggctggtcgctccctgcttcccccactcccccgtccactcagccaaatgcaggtcctgtccgtgccaggcaggctcaaggctccgctgccagtggcaggtcttgcgtggaccctgccatggaacgcttagggaagaggaagcaacagacagcctgaaggacacagacgygggtgcygagcgagacccggggggcgggacacggacgcgggtgctgagcgagacccctcccaccttccgttttcagggtctccacggtcccttggggagcccattgataacccccaggcttctgtcacagggaagcccagagctgcctgtcgaagtctggtgtgtggcctccccaggcaccccgcgtgtccaccatactggccaggcctgaaaggacgttggatatgggtttattaatattgtcccgttggctgggcgtggtggctcacgcctgtaatcccagcactttgggaggccgaggcgggtggatcacctgaggtcaggagtttaagaccagcctggccaacatggtgagaccctgtctctactaaaaatacaaaaattagctgggcgtggtggtggacgcctataatcccagctacttgggaggctgaggcaggggaatcgcttgaacctgagaggtggagattgcagtgagccgagatcatgccactgcactccaacttgggtgacagaaaaaactcttgtctcaaaaaaattaataaaaataaaatattggctaggtgcagtgggtcacgcctgttgtaatcccagcactttggaaggctgaggcgggcaaatcacctgaggccaggagtttgagaccagcctggccaacatggtgaaactccatctctactaaaaatagaaaaattagccaggtgtggtggtgcatgcttgtaataccagctgctcaggaggctgaggcaggggaattgcttgaacccgggaggtggaggttgcagtgagctgagatcgcaccactgcactccagcctgggcaacagagtgaaactccatctcaaaaataaataaataagccaggcgtggtggttcacgcctataatcccagcactttgggaggctgaggcaggtggmtcacgaggtcaggagatcgacaccatcctggccaacatggtgaaaccccatctctactaaaatacaaaagattagccaggcgtggtggtgggcgcctgtaatcccacctactcaggaggctgaggcaggagaatcgcttgaatccaggaggcagagagtgcagtgagatgccaccgttctccagcctggcgacagagtaagactccgtctcaaaagaaaataaataaataaaatatggccccccacaccgtaccctcctggccacagggcacggggttccctagagggcgtccctggagaacagctgagctgcttgcccagaggcagggggttctcggatggacctccccagctcggaccactggccttgctctgtcctgctgcgtctcctccacctgctcctccaccttgctgcggtctggccctcggtgaccctgtccttccctgcagggcgacctcggggacgmggggccaaagccccccggctggcgtgcgagacagcgggcgtcatccgcatcagtgacgacagcagcacggagtcggacccyggcctggacagcgacttcaactcctcccccgagtccctggtggatgacgacgttgtcatcgttgatgcagtcgggctccccagtgacgaccggggtgagggcttgcccaggctggccagccacctgtgggtcaggattccagtccaggctgagcagccacctctgggtcaggattccagcctgaggctcccccggcctcctggcrgtcaccacccaccccaggttgtagccctcagtccagcccacctgagcccagctgctgctatggtgcccactttacagatgggggaaactgaggcccagagaggggaggtcaggggttataccactggtcagaggcagagctgrggcttggggctgggcagtccctacccctgtggaggcagtgaggtcacagtgtttggtccgcgacaggaggcttagtctcgccccagctggtctcagggagacaagtgcagaaaagcagtcctgggccacggtgccgggcttccccgccaccctgccgtccctcagggttgccccgggccccttgtccttgccctccaggggccagccttgagttaggtgggccctagaaggcagccaacatgtcctgccctgaccytccacctcctccctaggahccctgtgcctcctgcagagagacccgcatggccccggggtcctggagcgggtggagcggctgaagcaggatctgctggacaaagtgcggcggctgggccgggaactgccagtcaacaccctggacgagctcatcgaccagctgggcggcccccagcgggtggcggaggtgggtgggacgtggcagctggagtgtggtgggcggggcatgggcagtgggtggggcttcacgcaggctgtgtgcagctctggtggcccctgctggtcactctgcgtctccgcggccctgcgaggagggggcgtttggggagccctggggcagcagcgtgctgtccagctcggcccgggaggccacgacctcctgtggacggcctgccccatccctctaagccccagatcccccagcctggcctgcgcaggcctctgcttagatcgttgcctgaacgcaccccttggggtgcccagggccaggacacaagcccctgggcctggttctgcggcctcctactccctgcccccgcccagcttcactttttcacttcgtggcgccggctggctgataataccaggccttggacaggcacacatcgcctgggtccagcagtcccgccctccctttcccagcacccccacctcccgtgcacagctgggagcccatgaccactgtaggacatagggaagctgagacacgggtggccagactcctgcgaggccacaacactgacggccggttttgtccctgtctcggctgcagatgacsggcaggaaaggccgcgtggtgtccaggcccgacgggacggtggccttcgagtcgcgggcagagcagggtctgtccatcgaccacgtgaacctcagggagaagcagcgcttcatgagcggcgagaaggtgcggggctgcagtgcactgggcgcggcccacgggacccaagaggcacagaggggcccaagggtccccggggactgtggacccgcgcacttctggagtgtgtgtgtgccaggtgcgggcgcgagtggccgtgtggcgggtggtgtccgcgccccgcaggcctctcgctgccccgggacgtcctggtgacctggagcgggggcctagtgggtgaggaggtggcggcaacgctggggcgggccttgcaccaaccgtgtcccggccccttctttccccctagctcgtggccatcatctcggaggcctccagctcgggtgtctccctccaagccgaccgccgtgtccagaaccagcggcgccgcgtgcacatgaccttggagctgccgtggagcgccgaccgcgccatccagcagttcggtgagtccggccccgcccccagcgctgcctggccccgcccccaacatggtctcggccccgcccccgcctggccgggccctgagagcagctctgcccccaggccgcacccaccggtccaaccaggtctccgcgccagagtatgtcttcctcatctcggagctggccggggagcgccggttcgcctccatcgtggccaagcgcctggagagtctggtgagcaggtgggggtggggctgagaaccagggacaggcccaggaaggctctccaaagctttgtggggtgctagaggccagaccccaggtgaccaactgatggcctccccacccctggcagggggccctgacccacggagaccgccgcgccacggagtcccgtgacctcagcaagtacaactttgagaacaaggtactgcagggaaggcagggttggggggcggggcaggggcaggggtctagggagggccggatctaagagcctgggggagggggtagatgggggctggagracgtggggctcagtggtctggaggagggccgggtctaggacccccaggggggaagggggcttctaggggctcagggaggtggcatccaggggtctgggggaggacccagtctaggacccccggggaggaggtggctgagagctgggggaggtggggtctaggagtctaggggagggcagggtccaggggcctaggggagggtggggttctggggaggcaggggtccagggaaagccagcctcctccctgggcctcctccccgagtcaccttctccccctagtatggcacccgggccctgcactgtgtcctcaccaccatcctgagccagactgagaacaaagtgcctgtgccccagggataccctggaggggtccccaccttcttccggggtaagctgggctggtgggggtcttcctgggaggggcaggggttgcagagcactgggctccagagcagctggggcagcaggctttgtaggccggttgtgtgttgagtgacccctccccacacacggacagagagggctgtgaaggcaaagggagccaaggcggcccccagcagctgccgggtgggtttccagggcagctgaggggcctggggtttgggtttactccccaagaacatgctgttctcactcctgtaagtcaggcaaaaggctccgctcctggccctggccctggccctaggctgcagctgctccccagccccccagggagctgctggtctctggaaaaggagctaggggcttcgagggaggggcaggggtrggaagaccagcatgtgaggcccctctccccgcagacatgaagcagggcctgctgtctgtgggyattggtggccgggagtcccggaatggctgcctggacgtggagaagggtgagtgccccacacccaggcccagaggcgctcctgtctytcatctcatgcaaccttggcctcgggtggtgagcaaagcagggagagggattcccagcgcagcctgaggcttggctccctcccctaccagactgttccatcaccaagttcctgaaccgcatcctggggctggaggtgcacaagcagaaygccctgttccagtacttctcagacaccttcgaccacctcatcgagatggacaagcgggagggcaaatacgacatgggcatcctgggtgagcacaggtgccggggtgtggtgtgggtgggtgtgggtgcggggctcgtgggaacgccatgcatcctgggtgggctcggggctcgtgggaacaccgggcatcccgggtgggcgaggggctcgtgggaacaccgtgcatcccgggtgggcgaggggctcgtgggaacgccgggcatcccaggtgggctcggggctcgtgggaacacygtgcattgtgggtgagcacggcgagggcctaggtgggcaaggggctcgtggaagcgccatgcatcctgggtgagcgagggtactgggtgagactgggcggatgcaggcacagggctcgtgggatcaccgtgcacgtctctggaaggtgcccaggctggtgcacgctgcccaccatgctcatccccaggcttcacggggcacctgctacattgttgtgaacgaaaggccggcgagcctgtgcttccagcctcatggggccaggcctgtccatcaggaccacttccctgtgtccagatgagggtcgggtccgggccatggctacttcactcatgagcagtgccgcagccaaccaggctcccacgatcccccacagcctgcttggggtcacccagcacctgagcagcccccaggctcctacaatctcctcacagcctgcttggggttacctaggatctgagcggcccccaggctcccacgatcccccacagcctgctcggggttacataggacctgagcggcccccaggctcccacgatcccccacagcctgctcggggttacctaggacctgagcggttgccaggttggggcccacgtgcaccatccccacgctgggccaggtcaggccaggatccaggacaccctctcctgtgctctcggggggtcgtctctagggtgcgccccggctacgggactgaccctggccccagcccacagtcccaggcctggacaccacttaccctccacccgcccccctagaccttgctcccggtatcgaggagatctacgaggagagccagcaggtgttcctggctcccgggcacccgcaggacgggcaggtggtcttctacaaggtcagcaggaagccccacagcccctcacactctgcccaccccgcccccaccacactcacacccccccaccccgtgccgtggcagatcagcgtggaccgcggcctgaagtgggaggacgcctttgccaagtcgctggcgctgacgggcccctatgacggcttctacctctcctacaaggtggggtcgggcggggttacccccccagaggagggcccgcggggggcggaccggggcgcggcctcaacgcccccctccgcaggtccgcggtaacaagcccagctgcctgctggcggagcagaaccgcggccagttcttcacggtgtacaagcccaacatcggccggcagagccagctggaggccctggacagcctccgccgcaagttccaccgggtaggcggccgccgggcgcagctttcgctcgggttgccggccctgaccccgcccaggctcatgcggccctgtgtcccyaggtcaccgcggaggaggccaaggagccctgggagagtggctacgctttgtcgctgacgcactgcagccacagcgcctggtgagggcgggccggggaccagggggaaaccggcagatggcggcgacccaggcggggatcgggggctcccgagaccctgagaggaggcgggagatctcagggcacctggggagcctgcgggcccctgggacccgcctgagccgagacgacccgtctcgtccgcaggaaccggcactgccggctggcgcaggagggtaaggactgcctgcaggggctgcggctgcggcaccactacatgctgtgcggcgcgctgctgcgcgtgtggggccgcatcgccgccgtcatggccgacgtcagcagcagcagctacctgcagatcgtgcggctgaagaccaaggacaggaagaagcaagtgggtgagtgggcggcgggcgccccgggaaggcccgagcccccagcgccggccctgaccccgacgctctgcccgcaggcatcaagatccccgagggctgcgtgcgccgggtgctgcaggagctgcggctgatggatgcggacgtgaagcgcaggcaggcgcccgccctgggctgccccgccccgcccgccccgcgcccgctggcgctgccttgcggccccggagaggtgctggacctcacctacagccccccggccgaggccttcccgccgcccccgcacttctctttcccggcgccgctgtccctggacgccggccccggcgtcgtgccgctgggcacccccgacgcccaggccgaccctgcggccctcgcgcaccagggctgcgacatcaacttcaaggaggtgctggaggacatgctgcgctcgctgcacgcggggccgccctccgagggcgcgctgggggagggcgcgggggcggggggcgcggcgggcggtggtcccgagcggcagagcgtgatccagttcagcccacccttccccggcgcccaggctcctctctgacacgcctttaggcgaaacatgccccaagacacagggaccgtttctcccctaggagcagcggtggggagcagggccaaggtcccctgaccactgctcagaggagccctaggccctggccgcagtgccttcagcgcccgacccgggcccccacctggtcagccctggcggggcccactcaggacagctgggggccggggcgtggcagggccctctctgtgcctctcctcccaagtaggaaggggctccgggtggctgctctgggactgggcacccacaagggctcagtgggcccaaacccttgaaatccgtgaaaccgggtggtcccaagagctagaaactcaggaaaccccaggtgctcagggccccgcgtctcgggggctccgtggggcagacccctgctaatatatgcaattctccctcccccagcccttccctgacccctaagttattgcccgctcacctctcccaggccccaggccgcggagctggcagggtggcgcctgcggtttctatgtatttatagcaagttytgatgtacatatgtaaaggacttttttaaatatatgtgccttttgcctacttcccacggagtctgctcctcagcctgtgggacagggagggaagggcaggggtgtgtgggcatccccccaggctctcctggttaccaggcctttctgcccactgcctgtgctggccccatgtggatgagaggggacgagggctgggagagacagacctctcaacccagtgtctggggcaggtgccatggaccgtccattccacagacccccagtgggggcagctgggatcagccaccctggcaggctgcagtccctctagctgtgcaggtgggcagccaggccgtgtccagacagcccccgggtcccatgaacggtggctggtactgctctaccagcccctcctggcctgtccatccccagccctcacggagggactctgtgcaaacagtaaccacccagccacccccacaccccccagccaggtgaggccccaagggccggtgtgggtgcccaacccatccccagcaccagggccacgctgttcctcgggcctctgcacttctgcttcctggccaggggaggccccagtagccacctcctaacagttaaggcccggggccaggaagcacagccacttagaattatctcctccaagactcggcactacaccaggccctgcctgtgcacagcaggtggggctgcacggattaagagccagggctgggtgtccaacgggcccagatctcactgcaccccagcactgcagccagcacagccccccgagcctggaggaagagggggcaacaacacgccacctccatggcacccccagcctggcagctgacggcaactggccctgacatggaggggcccctggcaaaagggccccccaagcccctacgcagaaagatccagcaggctaatttgtctgtttattcccacaaggtagccaggggtgggggcgccgagccaagcccagcaggccatgggaccttcctccggcggggtgcacgctggattttcgggtctgccccaccagcaggtttgcaggcaggccgtcatgagtgccggtggaaggctccaagggcgtgggcaggggctcgggcggggccacacacttgtggagctagaaatagtggggcaggtccttctctatcacctgtcggggaggaaagctgggttagggcagctacctcccaagcccccgagcctcaagcgggctccctagagaggacctaccaggggctcctccatgggtccgtagcgcttcaccacgcagccgttcttgtcgatgaggaactgtggagagacggtgtccaaactgtggggccacccctgcaaggggctgaggctgcccttcctgtccgctgcccatctgggccacggctgtggccaggggaagctggtcccctaccccccacagcccccttaccttggtgaagttccacttgatggcactggaaaagaagcacatggacgtgagcgtccccagcagccccccacagtccccaagctgtcctgtctccaggaggccacaagggtgtgagcttccccggctgcctccacagccacagtgcccccaagcccccccagagccatcttaccccaggaggccatgcagtgtgagagtcccaacagccccccacaggcccccgagccatcctgtccccaggaggccacaaaggtgtgggcatccctggctgcctccacagccctctatgtccccctgagccatcttacccccaggaggccacgcgatgtgagagtcccagcacctccccgcaaccgccccccgagccatgagccattctgccccagggaggtgtgagcatcccagcagcccccccacccccaccccagcagccgtactgtccccagaggtcacgcactttcccaggatgcccttgcccttgggttggatcttcatccacttccacagcgggtgggcgtcgtccccgttcacgcagatcttgctgaacatatcgaatttgacgttgtagcccgcggcgaactctttgatctcttcgttactccctggctcctgtggcggccaaggtgtgtgagtgagtcgggggctggcaccccctcagtccgggccccctgcacactcccaggccctctccaggctggagcccaccccgacccccacccacccgcctctgcgggccccggggacgcagcagcccacctgcttcccgaactggttacacgggaaggccaggatccgcaaaccacactcagcgtatcgggcgtgcaggtcgacgagctgagtgtagtttacttcggtcttgcctcactgggaggccacgttggtgacgatgcacacgaagcccctgcgaggatcggcggcgtcagcgcagaagaacacggccccctcccagggcccgaccccgcgccccaccccaggcgagcgcccaccggtacttgtccaggttaaccatgtgcccgtcgatgtccttggcggaaaactcgtgcatggagcgcgcacagcgccagtcgtcccgggacgcgcactgcaaggcaaaggaagctgagcagggagcgtggacgggaggctgagcccgggaccctgaggcaggaagggatcgggagcgggtcggtggcggggacaccgaggccctgcggccctgaagacctgaacgctcctcctccttaaacgcacacgcccccttgtacttctggtccggttttaccggagacccggaggccgggagagggttccaaccccaaaatgtgccacattagccggtgtgggggccccgcgcgcaccgggtcctgggacttgggacattcgtggatctccggtcgcaagctgcggggacagggcttcttccgccggcgccgcgccctcctgcgcctgcacgctggggccttccgccgccgaggggctcgcggccgccgcctgccccggctctggcaccgctgcctgcggcgcccgggggagcctgcgcccgcgcggcccatacccgcccgtctcccgcccctcctggctcccccaccccgagcgccgctagcggggacaaagggcccggaggccgtagtcaggactgcgcgactgtgacgccaccgcgctaggccaaggtgcgggggcggggcggcgcccgggggcgcgtgatccgggatttccagccctccgcgcccccaaccgctcgggcgcagcagccccgctcggcccggagacgccccgccgtggccctcaacggtccagctccgccccagccgtcccggaccccgccccctgcaagcttggacccccgaccccggccccggcacgcgcgcctgcaacggcctggacggccccttccccgaccacgacccgcgcgcgtggaacaaccccttccccttccccgaccccagcccgcgcgcctacaacggtctggagggccgcggagcgcgtcgcagtacggtcacccgcgtccgtgcccggccgggggtggggagggggagcccccagacgccccccaccaaggtcactggagcctgagggttccccacgccggcgagcggaggcagggatcgcgcgcccgccccaacggtcaccgggccggcaacggccgcggcgctagctcaccatggtcccggccaggccaggcgcggccagagccccacagagcagcgccggcttcagtaggcggcaaaggcggccgaggctcatcgcggcggggctgggagccagcggctcctcccctcgtccagccgaccaatggacgcgcgtcggctttccgcgcctcctttcccacggccacgccctccagagcgctcattggtcagacgcgtcggtgttgagcgctcgcgccgacgtcagccaatgggaggccggagtgggaagaaggcggggaagggggggcgggaccggacgtgcggacttgttgttggcgactgcgcatgctcgcttgtgtctaggaggccgtggcctggctggcggcgcgtcgggaggcagcgcagttatccggctggttgacagcagcgcggccgcaggccagacaacctgagaatactacttaagactcgtcgagggggtttggtttctccaactcgcagaaaagtgtccccaactcttatttaccttttttttttttaagacacggggtcttgctgtgttgcccaggctaacgtgcagtggcacgatcagggcacactgcagcctcgacctcccaggctcaagcgaacctcccgtctctgcttcccgagtagctgggacaacaggctcatccaccattcctggctaattattgttttgtagacatgggggtctcgctatgttgcctaggctggtctcaaacttctgacctcaagtgatcctccagcctcagcttcccaaaagtgctgggatcacatgcgtgagccaaaggctcggccgggatttgccttttttttttttttttttccgagacacagtttttttgctcttttgcccaggctggagtgcagtggcgctatctcagctcactgcaacctccacccagcccccgggttcaagcgattctcctgactcagcctcctgagtagctgggattacacgagcgagccaccacacccagctaatttttttgtatttttagtagagacggggtttcaccatgttggccaggctgatctcgaactcctgacctcaggtgatctgcccgcctaggcctcccagagtgctgggattacaggtgtgagccaccgcatccggccaagggatttgcctttttaatgtaaatgaaaccaaactgagttgggtttgcttctcatcacagctccatcttatgggggtgtccctaccctcacccctgccatgggcgcagggggtcagtgactccccatcctgggtctggttgctgagccgcttgtataatgtgggcactgagacctgagagtcatcaagacagttaccacttaactgagaacctggagtttcctgggctcccacccccaggggcagctgcccacgcagggacgcgcggtatgtgctcagaaaataaacacaagtctggagggttttcttacacttctaacattacaaggtatgggcacacccgagcccatactgccccacatcttggcttccaactctgtttttcacttcgtggcttggacatgtggcaacagaaacactcatctcatacttgggaactgagtcaccgtgattggactttgacccctgtacaggcaggggtttggattttttttttttttttttgaggagtcttggtctgtcacccaggctggagtgcagtggctccatcgcagctcactgcaacctccgctttccgggttcaagtgattctcctgcctcagtctcctgagtagctgggattacaggcatgtgctaccacgcccagctaatttttgtgtttttagtagatacgggctttcaccatgttggtcaggctggtctcgaactcccgacctcaggtgatccgcctgcctcggcctcccaaagtgctgggattacaggcgtgagccactctaccccgcctaggtgcttgggatttgtatgttgccctcaaggtcttaaccttttctgaccctgcactgaatatttcttcagagacagactcagggccgggttgacctggggggcgctatgagcctgcccccgccactgcccccgactcaggcctgccagatgcagcacagaggcgtcatggatggtttggtggcagaggcagtgaagcaaggatccctgagcagggctggccgaatcctggtcttgcataagcctgttcacatggctttgctcccgcccagcccctagaggctgagttcttggagtcaactcccattgtctgacttctcaggaaacccccccatttcctcccgccctggcagtgccgggtgacagggccacactggtgactctgttcttgcccttgcgaaggctcagctgttcgcaattttgccggtgttgttttccttaagtttgttgcaaacatgtgcactgaaatgggagtttatttcagggttgccagaaaaacagctcagcacccacagctccgcggagagacttgatcccattcctgacttcctgccaattgtgataaagtcagaagtggggaaaacacggggtcgcga

SEQ ID NO: 97675 - DNA, 15310 bp, Homo sapiens
cttctaccctgagtggggtgggagtggtctcagggctccaagcagaggaggggtggggtcagatgtttcatctgggtccctctggctgctgtgtggaaaacagcccggaggaggatgagatctcacacagggagaccagagctgagatgactgcaccagtccaggccagagaagacagaggctcaggccagtaggcagcagtgacggggcgaagagggatcagattctggatctttctctctctctctctctcttttttttttttttttttttttttttttttacagacaaggtatcactgtgttacccagggtggagtacagtggcgaaatcatagctcactgcagccttgaactcctgaactcaagcgatcccttctcctgagtctcccaaagtcctgggattacaggagtgagccactgtgcccagggcaggttatacattttttttgggaacaccacagaagccaagcacagtggctcatgcctgtaatcccaggacttctggaggcgaagatgagaggattgcttgagcccaggagttcaagaccagtctgggcaacacagcaagaacccatctctaaaaaaaaaggaatactgctgggcacggtggctcatgcctgtaattccagcactttgggaggctgaggtgggtggatcacctgagattaggagtacgagaccagcctggctaacatggcgaaaccccatccctaataaaaatacaaaaattagctgggcatggtggcagggacctgtaatcccagctattcaggaggctgaggcaggagaattgcttgaacccaggaggcggaggttgcagtgagccgagatcacatcactgcactccagccagggtgaccatgcccagccaactatgtaaatatcctatacacacacactcttctgatttcaccaatggttttaacactcactcttacctgaatccattattattatattggttatgtttatcattttttaaattctacattccttttacaattgttagctttcctacagtaaaataactttccagtggccgggcacagtggctcatgcctgtaatcccagcactttgggaggccgaggcaggtgaatcacgaggtcaggagttcgagatcagcctggccaacatggtgaaaccacatctctactaataatgcaaaaattagccaaacgtggtggtgcgcacctgtaatcctagctacctgggaggctgagggaggagagttgcttgaaactaagaggcggaggttgcagtgagccgagattgcatcactgcactccagcctgagcgacagagcaagactacatctcagaaaaaataaaacaaaaacaaaaaaaacttccatactgtcctacctcccttccctgctccctccctccttctctttgtctctaatattttcagaatcagtatgaactcattttcttttcttttttttttttttccaagacaaattctcactcttttgccgaggctggagtgcagtggcatgatctcagctcattgcaacctctgcctcccaggttcaagcgattctcctgcctcagcctcccgagtagctgggactaccggcgcccatcaccacacctggctaattttttggtaatttttagtagaaacggagtttcaccatgttggtcaggctggtctcgaactcctgacctcaggtgatcctcccgtctcggcctcccaaagtgctgggattacaggcatgagccactgcgcccagcctctttttttcttttaattaaaacaattaaatagagatggggttctctgtctgttgcccaggttggtcttcaactcctgggctcaagcaatcctcctgtctcgggctcccgaagtgctgggattacaggagtgagtcaccacgcccagcctaagtattgctcttctgtgatgatttgcaggcaacaatcacctcttgttcatattttcattatctttccctccaccccgagcctatagtctgtcttggtcagaccccatttcttgagtgcaccaggctggagtttggacccatccacatcctcgcagctctcctgagttggggcccaacatctggcttggggaacagacagctttgccgacagcagtaacaatttggttgaaatgataactttgtcaaaaatgaattttgccttagtgtttttttaaaggttgagaatcttgtacattcttacaacatttctattttctacagttaaaaaactgtaggctgggtgcagtgactcactcctgtaatcccagcactttgggaggccaaggtgggtggattgcttgagtccaagggttcgagaccagctaggcaacatagcaaaatattagctaggtgtggtagctactcgggaggttgaggcaggagaattgcttgaacccaggaggcagaggttgcagtgagccaagatcatgccactgcactccagcctgggcaagagagctagattgtctcaaaaaaaaaaaaaagtaagttccaattactttgcagccaattattcttgctcttctatttgcaatagcagaagattgaaatagcctcctagatgtctgacagtggaatgggttcttttctttttcttttttggtagagatgagggtctcactatgtggccaggcaagccttgaactcctggcctcaagtgatcctcccgcctctggaggcaggaggtagggtacagtcccagactcaaagcactgggattacaggagtgaaccactgcgtgagcctggtttcttttctttcccctccctcccttccttccttccttccttccatccgtccttccttccttccctccttctctcctctttcactctacctctttcttttcttcttttttctggcttgttaaaacagaaatacataataattatagtgaaataaactagggtatttactgcagcagttagtaataatgaaatgttggaaaacaatctaatgttcatccgtagggaatatttaaaatatagtgtatttctgccgggcgcggtggctcacgcctgtaatcccagcactttgggaggccgaggcaggtggatcatgaggtcaggagatcgagaccacggtgaaaccctgtctctactaaaaatacaaaaaagttagccgggcttcgtggcgggcgcctgtagtcccagctactcgggaggctgaggcaggagaatggcttgaacccgggaggcggagcttgcagtgagcagaaatcgcgccactgcactccagcctgggcgacactgtgagactccatctcaaaaaaataaattaattaaaaataaataaataaataaaatatagtgtatttctggccgggcgcggtggctcactcatgtaatcccggcactttgggatgctgaggctggcagatcacaagatcaggagatcaagaccatcctggctaacgcggtgaaaccctgtctctattaaaaatacagaaattagctgggcatagtggcatgtgcctgtagtcccagctacttgtgaggctgagacaggagaatcgcttgaacctgggaggtggaggttgcagtgagctgagatcgagacactacgctccagcctgggtgacagagcaagactccgtctcaaaaaaaaaaaaaattatagtgtatgccatggaatattatgcaactgttatatatgtgtgtgtgttcccaaagcattgttcagtaacaaaggaaaagtgcaaaacactaaaatggatgaatacatgcttgtgtaaacacagacactgtcaggaatgtttgtctggaggtgatgggtatggagcctttttgtctgatatattgggtgtatcaagaatgccaggtcctgagcagttttttttttttttttttgagttggagtctcactctgttgcccaggctggagtgcagtggcacaatctctgctcactgcaacctccacctcctgggttgaagcgattctcgtgcctcagcctcccgagtagctgggattgtaggcgcccgccaccatgcccagctaattttttgtgtttttagtagagacggggtttcaccatgttggccaagctggtctcgaactcctgacctcaggtgatctgcctgcctcggccttccaaagtgctgggcttacaggcatgggccaccgtgcccagccgtttatatgtattaactcttaatcatcaaaacaaactatgtggtattaccataattatcgccatttatacaaagcaacagagggataaggagattaaggcacttgcccaagtgcaagaggtaggacaggaacccagagtcccgtgctggtagctgcttttctgtgcacttaacattatctcatttaattcttgcagtcacttcatgaagaaggtggcggtcctagggcattggagaagttatgtgcttgttcaaggtcatgcagctggaagatggtggtggtaggacaggaagtctgtagggcctgattctgcagccctctagtctatactcctttgctcctgtgtccctcatcccccctgcagaatgggcaccccgttacctttctgagccactgtgcgcagaaaagagagcatgttggccaggctggtctcgaactcctgacctcaagtgatcagcctgccttagcctcccaaagtcctgggattacaggcgtgaaccaccacgctcagcctctgaatactttgtactcaagccatttttcagtgctgtgtttgcagtgagcacacccgagggatgaagacacgtctccctgtgggaacctgggcttaccagggcccctagaggaggggaatctctcaagctcagagctctatggctgcggtgcaggcccactgtgtgcatggtgtcagtctgggcccttccatgttgcccccgtgggacttggggtaaggggaactgatgcaaacatcacgctgctgttgcttggtgtgagcaattaattcctgtggctctcacccaggagtctcatgtctttgggtcagacaaactcatcagcttgtagaaatggcacagtcccacgggcctgttagaatcttctattgtgcacatgttgctcttaaaatatacaaatcagttttgattttaaaaaattatttatttttttagtgataggagttttgctacgttgcccaggctggtttcaaactcttgggctcaggaggtcctcccactttggcctggactgccagcataatgtatcaccacacccgggactgattttcgtttttcaagaacaaaaaccaaaaacatacacaaaccgagagtcaaagcttgctaattagaggaaagtcaggaaatgggaaccattcaaagaagaaaatacccccacctcctactctcacctatccaaagacaattaggtgaatcccttagtagatatctttccagacggttttccatatagattcccatatctggccaggcgcggtggctcacacctgtaatcctagcgcttggggaggctgaggcggatggaccacctgaggtcaggagttcgagaccagcctgaccaacatggagaaacctcgtctctacgaaaaatacaaaattagccgggcacagtggtgcaagcctgtaatcccagctactcaggaggccgaggcaggagaattgcttgaacctaggaggcagacattgtgctgagccgagccaagatcatgccattgcactaaactccgccttaaaaaaaaaaaaaaagattcccacatctttactagtttgcagaaataagatcctagcatatgcagtgtgtaggaaccaccttggtttagccacgtctctgtgactgggggccactgtggtgacccccagctccccggacagagtcaagagctcaccagcctgcaaaggttttcacggcccccagccagactcgggggcttcctcttgccctgctacttcctgggagctctgagggcaggaaatggcgccactcagctcctggcctaacagcttggggaccacaaatgcaaaggaaaccaccctcccctcccacctcctcctctgcacccttgagttctcaggctcacattcccaccacccacctctgagcccagccctccctagcatcaccacttccatcccattcctcagccaagagccaggaatcctgattccagatcccacgcttccctgcctccctcaggtgagccccagacccccaggcaccccgctggcccctgaaggagcaggtgatggtgctgtcttcgcccagcagctgtgggagcaggcgggtggggcaggatggaggggtgggtggggtgggtggagccagggcccacttcctttccccttggggccctgtccttcccagtcttgccccagcctcgggaggtggtggagtgacctggccccagtgctgcgtccttatcagccgagccggtaagagggtgagacttggtggggtaggggcctcagtgggcctgggaatgtgcctgtggcttgaaaagactctgacaggttatgatgggaagagattgggagccattgggctgcacagggtcagggaaggccaggaggggctggtcactgctggaatctaagctgctgaggctggagggagcctcrggatggggctgatgggggagctgccagcatctgttcctctgtcatttctgataacagtaaaagccagcatggaaaaaaccgttaaaccgcaggttgggcctggccgttggcagggaagtgggcagaggggaggcccggccaggtcctccggcaactcccgcgtgttctgcttctccggctgcccacctgcaggtcccagctcttgctcctgcctgtttgcctggaaatggccacgcttctccttctccttggggtgctggtggtaagcccagacgctctggggagcacaayagcagtgcagacacccacctccggagagcctttggtctctactagcgagcccctgagctcaaagatgtacaccacttcaataacaagtgaccctaaggccgacagcactggggaccagacctcagccctacctccctcaacttccatcaatgagggatcccctctttggacttccattggtgccagcactggttcccctttacctgagccarcaacctaccaggaagtttccatcaagatgtcatcagtgccccaggaaacccctcatgcaaccagtcatcctgctgttcccataacagcaaactctctaggatcccacaccgtgacaggtggaaccataacaacgaactctccagaaacctccagtaggaccagtggagcccctgttaccacggcagctagctctctggagacctccagaggcacctctggaccccctcttaccatggcaactgtctctctggagacttccaaaggcacctctggaccccctgttaccatggcaactgactctctggagacctccactgggaccactggaccccctgttaccatgacaactggctctctggagccctccagcggggccagtggaccccaggtctctagygtaaaactatctacaatgatgtctccaacgacctccaccaacgcaagcactgtgcccttccggaacccagatgagaactcacgaggcatgctgccagtggctgtgcttgtggccctgctggcggtcatagycctcgtggctctgctcctgctgtggcgccgrcggcagaagcggcggactggggccctcgtgctgagcagaggyggcaagcgtaacggggtggtggacgcctgggctgggccagcccaggtccctgaggagggggccgtgacagtgaccgtgggagggtccgggggcgacaagggctctgggttccccgatggggaggggtctagccgtcggcccacgctcaccactttctttggcagacggaagtctcgccagggctccctggcgatggaggagctgaagtctggrtcaggccccagcctcaaaggggaggaggagccactggtggccagtgaggatggggctgtggacgccccagctcctgatgagcccgaagggggagacggggctgccccttaagtgtcggtgaatagtgaggctggaggccgsaatctcagccagcctccagcaccttccctctcaccatcccactgccccctcgctcccatgtttccacccggcaccctgatcctcacccgaatctcctttttttttttcttttgagacagagtttcgctttgtcgcccaggctggagtgcaatgcacgatctcagttcactgcaacctctgcctcctaagttcaggcgattctcctgcctcagcttcccgagtaactgagattacaggcacccaccaccatgcccagctgcttttttgtatttttggtagagatggggtttcaccatgttggctaggctggtctcaaactcctgacctcaggtgatctacctgcctcagcctcccaaagtgctgagattacagacatgagcctccgcgccttgcctcctcacccacctcttcactctgaatcctcatgaggcttctcagccctggatttcctgctgccatcctcacccagcacccacaactagcgcctgggcagggcagggctggcacctctcaacgtctgtggactgaatgaataaaccctcctcatccacccctatttatctccatcaccatttccccctctttcttgttcctggaaacggctgctgagtctccatcggccaaacttatctgccctgtgatttctttgacaattctccttttcccccagaacccaccctgggttgaccagagtctgggaagaaggacaagagaacccggcaaactccctcctaggattaactttgtaaagcacccttgccctgtagctgcaagggctgtggaacctgggcagcccgcaaccacctttagctctgggccccccaggccagcctggagcatggctgggtggggccaccagcccatgctctcaggcgggcctgtgatctttcccagggcacatggactgtaggctggccctggcccacaccaccacactctccccagccatggacagaggcagccagaggcctcacggtttctcctccgagtttctggctgggtgtagttctcagaaaccccagtgcctgcgtgtgtccactcgtgggtgtggtttgtgtgcaagagctgaggatttggcgatgcttgggaggggtagttgtgggtacagacggtgtgggggtgggaagtggtgcagagactgaagagggtcaacctgggcatgggggacacagggactgctgagaacgtgcgtgtcatctttgctctgatggggtggacatagcagaaaatctaactctgtctgtagccccatacagaatgccagggtgagcacagtggctggtgcctttaatcccagcactttggaaagttgaggcaggaggatcgcttgagcccaggagttcgagtctgaagtgagctgtgattgcaccactgcacttcagcctgggcaacagagtgagcccctgtctcaaaaaagaaaagaaaaagaaagccaggcttcatggaaagatcgtatgtgtgacccaaatatgagttcttcagctcagccatggtaatcccttccttgaagtctccatttctgcagtacacatgcatgtgcgctctctctctctctctcacacacacacacacacacacacacacacacgcgcgcgcgcgcgcgcgcgctctcctgcgaacagaggcagggggagaggggtttgccctggtctcggggactggtctggctggcgcttccccactgcacgtttccaggtttagtttgtctgtgtctcctcttccatcccaggggctgagccccttccatcctccaagaggaaccagtgagagtgagtgaaggaggggcctggagccagggacttcccctgtggggcctgggtggagaggggagaactcaatggtgctgcctttgagaccagcccaggctacagcccaggagcacacatgggccagggcagttggtatttcccgaggacaaagaggaaattttcaaagaggaagttgttgagttagagcttgcggtggctgagagcagacaggttgacctgcaaaaaaagacaggggaggcatgtgagtgtgacagccctgctctgtggcctgggcaggagatgggggaaagggtcaggtgggggatgggctcgtgcagtgggagaggagacggagggagggagcgggaaggggcttgcttagtgggtgggaagagctgagctcggatggaaccagcttctaccagccaggctgggcacccactgggctgcatctggtggccttttctgattgctatttggactcactgcagctgcagaatgacagaggccatgtccaaaatcccttagagacactgttgtcttagagttgttaaaataagagcccccatatcaggtttagaaaatactgtcaccgaacgaacgtcgctgtcctcagctccacctccctttcctttgacagatatggttgttttctaagccaggactggttttagtcaggtcctgggcgaatcctgaaaaaaagaggtagtacgggtaaggaaggcacccaacagggctttcacaatccagaaaatatcaaaatataagtgttaaaagagaggcacaggccgggtgcggtggctcacgcctgtaatctcagcactttgggaggccaaggtgggcagatcatgaggtcaggagtttgagaccagcctggccaatatgatgaaaccccgtttctactaaaaatacaaaagttagccaggcatggtggtgtgctcctgtaatcccagctacttaggaggctgaggccagagaattgcttgaaccctggagtcagaggttgcagtgagccgggatcatgccactgtactccaggctgggtgacaaagtgagactgtctcaaaaaataaaaataaataaaataaataaaagagaggcacaaacagtgttatgaatgcaccaaggaaaatggtgcattcataactctcaggtgaagcctaccaagccatgcgtgtgtgcacatatgtgtgtacgtgtgcatgtgcgtgcgtgcatgtgcgtgcgtgcatgtgcctgtgtgtgtatgtgtgcacatgtgtgtgcgcatgtgtgtgtgtgcgcgcatgtgtgtgtgcatgcatgttctcccatgcatgtgtactgtggcaagggagactttgaggaagagattccagtggctgagcagaagggctcgcattgccctggcgaaaggttggaaggcttcacctgagagtgtgtcgtggcctttgtcatatccactgcttgattcctttctttaaaaattatttttattgttttctacatatgagaaccaccacacctggctaatttttgtattttttgtagagatggggtttcaccatgttgtcccggctggtctcaaactcccgggcacaagagatccacctgcctcagcctcccaaaatgctgggactataggcatgagccactgcacccagccactgcttcattcctggtggctgctgtgcctggcatgttgcagatcctccatgaatatgcatttgaatgaatgaatgaatgaatgaatgaatggagatgacgcctcagagattctttcttttgagatgaggtctcattctgtcacccagactagagggcagtggtgcaatcacagctcaccacagcctcaacctcctgggcctcccaagtagctgcgatcacaggtgtgcaccaacatgcccagctaattttttttttaatttttaatttgtacagacagggtcttgctgtgttgcccaggctggtctcgaactcctgggctcaagtggtcctcccacctaagcttccccaaatactgggattataggtgtgagccactgtgcccaggcttgcctcagatatttgaaggctgggaaggattttgcaaagctgggaaaaggaaaaggcattcccagcagaggggatagcaggtggaaatacataattaaaaaaaaaaaacgtggagcagatccagcgcagtggctcatgcctgtaatcccagcactttgggaggcagagcagggaggattgcttgaggctaggagttcaagaccagcctgggtaacatagaaagaccctgtctctacaaaaacacaaaaaattagccaggcgtggtggtgcatgcctgtagtaccagctacttgagaagctgaggcaggaggactgcttgaagccaggagtttgagaccagcctgggcaacatagtgagaccccgtgtctacaaaaagtaaacatttatatatatattttttaaagtggagcagttcaatatagagtcttttttgaacaaacgtgaaatagatgtcttttttttttttttgagatggagttttcactcttgttacccaggctggagtgcaatggcgtgatcttggctcaccagaacctccgcctcctgggttcaaacaattctcctgcctcagcctcccaggtagctgggattacaggcatgcaccaccaaacccggataattttgtatttttagtagagatggggtttcaccatgttggtcaagctggtcttgaactcccgacctctgctgatccgtatgcctcggcctcccaaagtgctgggattacatgcgtgagccaccgtgcccgacaatagatgtcttttaattttctggaggaaaaagcaaagcaaaagaagcagtggatattttaagactaaaaaggaaaacaaaaaaaggagatagagcaggccagacgtggtggctcaacgtctgtaatcccagcactttgggaggccgaggcaggtggatcacctgaggtcaggagttcaagaccagcctgaccaacatggtgaaaccctgtttcaaaatacaaaaaattagctgggcgtggtggcgggcacctgtaatcccagctacttgggaggctgaggcaggagaatcccttgaacccaggaggtggaggttgcagtgagccgagatcacgccattgcactccagcctgggcgacaagtaaaaaactccatctcaaaaaaaaaaaaaggagatagagcaaggaacagtaagaaaatagttgggtgcagtggctatgcggtggcactataggaggctgaggcgggcagatcacctgaggtcaggagttggagaccagcctgggcaacatagacccctatctctacaaaaaatttgaaatatgaaaaattagccaggtgtagtggtgtgcgcctgtggtaccagctactcaagaggcgaaggcagggaagattgcttgagcccaggagtttgaggctatagtgagctgtgatcatgccactgcactccagcctgggcaatagtgtgagactctgtctcaaaagaaagaacatggccaggcgtggtggctcacacctgtaatcccagcactttgggaggccgaggcagtcagatcatgaggccagtttgaaaccagcctggccaacatggtgaaaccctgtctctactaaaaatacaaaaattagccaggcgtggtggcatgcccccgtaatcccagctacttgggggtctgaggcagaagaattgcttgaaaccgggaggcagaggttgcagtgagccgagatcgtgtcattgcactctagtctgggcgacagagcaagactccgtcttggaaaaaaatttaaaaaaagaaaatataaaatatggtataagattaaatatattagttatgaaaataattgtaaatggcttattgaacttatagtcagtaaaaatcatgtttttgaaaattatgtaatgactttggaaaataccagcaatataatgttaagtggggaaaaaagcaagttactcctctgtaatacatatgattttagttttgtaataaaaattcccaaccatatatgcacttatagggaaacaaaggacccatcgcaaatgttttccatgctgatctccaaagtggtgagtttatgtgtgatttttattttgtttatgctcttctgtattttccgaatttcatacaataaatatctgttacttttacaatatgaaaaaatagtggtcaaaaaggtgttcaagggggtggcctgggggtgtctggtttgaggagagtggtaggggatgaggctgcaagtggaggttggagccatgctatgaaaagttcaagagtttgaattgagttctgaggtttgtttttgtttttgtttttgttttttgagacggagtctcaccctgtcacccaggctggagtgcagtggcacgggttcatgccattctcctgcctcagcctcctgagtagctggaaccacacgcgcccgccaccacaccaggctaatttttttgtatttttaggagagacagggtttcaccatgttagccaggatggtctcgatctcctgacctcgtgatccacctgcctcggcctcccaaagtgctgggattacaggcgtgagccacagtgctctgcgtgagccatagtgctctgctgagagtttgaattgcattctggaagtagtggtgaaatcaacacacctaagtctgctcttctcctctcttctagtccccagagtggtgagtagcatcgttctggtggcccaggcaaaacgccttaggaccaccgtgcagccccactctttccccattcctgctctccaggtgccaagtccctggctcttcttccaccgacccttgcatcccttccttctcttcagtcctcatcgcacctcaccgggatcctattgacacttcccctttgatttccttccgctctctgctagtgatggtcccagggacccttctaaaaggtcactgtgggctgggcacagtggctcacgcctgtaatcccaacactttgagaggctgaggtgggccaatcatctgaggtcaggagttcgagaccagcctggccaacatggtgaaaccccatctctactgaaagtacaaaaattagccgggcgtggtggtgtgcacctgtagtcccagctactcgggaggctgaggcgggggaattgttggtccccgggagatggaggttgcagtgagccaagatcgcgccgttgcactccagcctgggtgacagaatgagactccgtctcaaaaaaaaaaaaaaaagaaaaaagaaaaatagctgggcatcgtggcacacacctgtagttccagctactcaggaggatgaggtaggaagatcacttgagcccaagaggtccagactgcagcgagtcatgatcacaccactgcactccagcctgcgtggcaccctgtctcaaaatataataataataaaatttaaaaataaaataaaacgctgctctgtctaggtgatattcctctatccccaaggctgtcagggtggaaccctccttccttagcgtggcatataagcccctcgggacctggccctatctctcctctgaccacccctgcccggtcagcccttgttacagacagtctgtgctatccagcccc

SEQ ID NO: 97676 - DNA, 12773 bp, Homo sapiens
cacaagctgtgtaacgttgggaaagcttctcagccttcctgagcggccctgtcctcatctgttacacacagtcgctcaaggccctcacctgtacacctgccatgaggctggaatgagggagctcatgcagagacagggcccggcacacccagatgagggtgacacaacaatccgtaccacctgccagaccatgaggataatggagactgtgcctgtctcatcaccgcatattcctaagagccccagacggcgcccagctatcaggtctcaacaatatttgttgaataaatcatgagtcccacagccatcaaaaatctcaaacgcaaataggagggacaaaccatgtgcagctgagggagacagccgggccaaagccctgaggtgtgcacagcttctccagctccattcaatggcccaccactagttcaaactgggcagagcagctctcaccgatgtcaaagccatcccgtgaaaacactgcattcagcctcaactttggaccccaccctgacatcacacacaggcttctttcccactctgcttcagctgaggtccccaccaggagggccaaggggagactccctccatgataagtgaggcaaaccacccccgtcctttcccaacaatgttggggaaactgatgtcatcataacagtccccttgcacaaggtggctgtaaaggtaaaatgagagaacgtgaatcagtgcctggcatacagctggcaccccataaatcccaattagatagtttttaattattttaccccatagcaaacacataagtagcaacaggtgccccttccaaaatcacctgcaaaacaacagagggaggctggagcagcagaaggggtcagggctttggactcaggtggagattttattattattttttgatacagtctcactctgtcgcccaggctgaagtgcagtggcacgatcttggctcactgcagcctctgcctctcgggttcaagcgattctcatgcctcagcctcctgagtagctaggattacaggtgtgtgtcaccacgcctggctaatttttatatttttagtagagatggggtttcaccacgctagccaggctggtctcaaactcctgacctcaggtgatctgcccacctcggcctcccaaagtgctgggattacaggcgtgagccaccacgcctggcctcagatggagatttgaagctgagagagcttgggtaagttacctgacctctataacctgtttccctatccacaaaatggagataatattacctaccccaaaggactgctatgacccaaggaaatactgcctaccactcactctcatgttagaatcgctcggaaaaggctatggcccagacctcccccagaccaaagccatcagcgtctctggggtggggcctgggttttgggggttacgaagatccccaggtgatcccattgtgcggccagggctgagaaccacacatgcttatgtggacctggcacaaagtaggcactcaagaaatccaagctttcatcattatttctcagctggccaggattttctttcattcattcagcatacatttgtagagggcctaatatatgcaaatgcaaatcaaatttaaagtcatatgttggttttcaagagccgggggtagggggaaagaggagtgactgttaacgggtacaggatttccttctggggtgacgatgttttggaactagacagaggtggtagtggctaaatatcactgaattcttcactttaaaatggttgattttatgttatgtaaatctcacctcaacaaaaaaagcaaaataataataatcataacccagacacgaaaaagacaaatcctatattaacccattcatatgtggtccctaaaggagtcaaagtcatagaaaatgaagagagaatggtggctgccaggggctgggggagggggactaggagttaacatttaatggggacagtttcagtttgagaagatgagaaagttctggagatggatgggggtgatggttgtgcaacaatgtgaacgtactcaatgaactgcacacttaaaactggttaaaatggcccattttatgttacgtgtattttatcaccatttaaaaaaaggtcacatgctgacagtccctcaagacattcattgcccacctcagctacctgtagcccccacctccttaccataggagatgacatcttcccagtttttccaggcgagcaacttcgagtagctgaccgccctctttacaaacaggatggaggctacgcatgtgttttctctgtggggcaaggccagattaagcaaagaaaacacagcagctccttccccctccccccaggaaaaaccctgtccggtcaatagcagaactaaagagctggtgcacactttcacttcccactcgagtgcctgcggacccggcttctcctaggcgtccagcaaagcccagacttaaaggtggcaggtgctgtcctctcaccctgcttcgggtgaggacgggtctccaactgagctccaatgaacaagacgaggctgggctggctccaggaggcaatttctggctgggaggtggggaagaaagacccagaagaagggcagggtgtgacagagggacctgaatcccagagccctgggtctcctgctcccctccctgagtgcctctggatatggcgcttccaggctggccctcaacgtccacacctataggaacaagagaactgaattcaagtgggaaaagcaaatgggtttatctcaggtgccaacttcttcccaccgggaggctctggggtggctgcggctctgcagggcaccaggaggaccaacaagggctggagggtggaggggaccacacatggtctgtgcattcaccatccctgcatgagatcccttccataattcctcaatggaattccatgaatgtgctttctggatctagaacgcactcggtggcctccctgactgacacatgtccatctgacctttgcttgcacacctgctttctcagggagctcactatcttctccggcaggctgctcctctccatacaggacgccaaaatctcggccctacaaccccttcccaggagctgctggcgccatgcagaactgtcggctccctgttctactctacggcttgctgataccttaccactccctctgcccctgtaaaagccttgcttccttccactgtgctacatgtgagtggctttcaaaggatggcctgttccggaagcttgagggaatgcccacgcaatgtgtctccctgaccagccttcgccttcccaagagtgaagtggagactggccctgggatactttctggggtgggggggaagggcagtggcagagatggctagcgtggcccatgccaacaccctattctggcctcctctcccttctcaataataaaaatcctgctgtggggtgggattcatggctcccacttacatttcccagatgctcttgcagccggggatgccacatgatggtctggccagtaaggtgaaagcagaagtcaccttaacagggcagaagtccttttccactcccctgccactcccactttctgctaactggaatgcaaacgaaatggtaagatcccatttcccactaactggaaggcaggcaaaatggcaggaacttgagcctctcttggcccatggtgctaagaacggaggagcagccacatggaggggccctaggccctcaaagccacaggccagccacggcaaccctcacacgacttagaccctagatttcctttatacgagagaaaacaaacaagcttctgctgtgtttaagctgctgcatttttaaatattatatgatcccggagtcttacatgcaggagcaaggagttctgagtgctgatgacgacagtccagccgccttcacacagggagggcagccattgccttcagtgggaaaggaggggacctggatgcacagtccataccctgccctgtatctacgccttaagaattcaggctaggtgcggtggctcacgcctgtaatcccagcactttgggaggccaaggcaggcagatcaactgaggccaggagttcgagacgagcctggccaacatggtgaaaccctgtctctactaaaaatataaaaattagccaggcgtgggtgtggtggtgtaagcttgtaatccccgctactcaggaagctgggacaggaaattacttgaacccaggaggctgaggttgcactgagccgagaccacaccactgcactccagcctgggcaacacagcaagattccatttcaaaaaaaaagagttcagggccgacatttccaagcccgatgtgtatcttcaaaatcagaagatagacacaaccagctgccgtttttcaagcatcaaccatatgcccaggtgctcagctcaacgcggcatgaattagccccacgagataaaaatggtcctactatagatgaagcccaaagaggtccaccaagttgaggctgaaacccaggagccctgacctccacgctggggctggggtcttttcattcatcttcaccgtctcctaaagatccttagggagcctgagaagctgaacttggctgacgtcgggaagtaaggacaaaaggaaagaaggggtgggagggagaagaaacaggaaatgggagaaactcttggattcctgtaaatggagattatctatgaagatgttcactgtggcattgtttacagcagcaaaaatctagaagcaatctagaagaccatcaacagaatgcataaataaatatgccacggcttcttcatacaatggatctcatatacagaaagtaagcaaactaaaaaggcaagttgcacaagaaggcccaagtaatgatactatttatatgaaactttacaatctaggaaacatggccactctgcagacaccggcgccgtcgggaaacctgttctatcagccatggtcaaccccactgtgttctctgacatcgctgtcaacggcgagcccttgggccgcatctccttcgagctgtttgcaaacaagtttccaaagacagcagaaaactttcacgctctgagcactggagagaaaggagttggttataagggttcctgctttcacaggaacattccagggtttatgtatcagggtggtgacttcacacgccgtaatggcactggtggcaagtccatctatggggagaaatttgaagatgagaacttcatcctaaagcatacaggtcccggcatcttgtccatggcaaatgctggacccaacacaaacggttcccagttttccacacgcactgccaagactgagtggttgaacgcaagcacgtggtctccggcaaggtgaaagaagacgtgaagactgtggaggccatggagcactttgggtccaggaatggcaagaccagcaagaagatcactattgctaactgtggacaacttgaataaagtttgacttatgttttatcttttttttttttttttgagaaggagtctcactctgtcacccacgctggagcgcagtggagcaatctcagctcactgcaagctctgcctcccgggttcatgccattctcctgcctcagcctcccaagtagctgagactacaggcgccccccaccacacccagctaattttgtttgtatttttagtagagacaggatttcaccgtgttagccaggatggtcctgatctcctgacctcatgatccacctgcctcaacctcccaaagtgctgggattacggcagtgagccaccacacccagcaacttgtgttttatcttaaccatcagaccgttccttctgtagctcaggagagcacccctctgccccatttgctcacagtatcctagaatctttgtgctctcactgcagtttcctttgggttccatgttttgttcccttccatgcctagctggattgcagagttgagttaagtttatgattgtgaaataaaagctatataataacaaaaaaaaaatctaggaaacattatggagtgttctataagagtatgtagttgtacaagtacaaaaatatgcacaagaataaacatcaaagtcggggcagagaaaaggaagggtttgaaatcagagaacgrtacatcaggtattgcaactggaatggtttatttcttccgctgagtggttacactgaaatattattttataccctgctttgcatggctgaaacagatcatcattttaaaagcaaagggagaatatgcagtttattgcatgtcaactttatctgaaagcaattttttttatgcacctagagagaaagagacagagagagaaagagacaggagggagggagggagagaagggaggaaagggttaaggcctccagacacagcatcttctcctcatggcccaccctcctctccagagggccagccatgctgaccacagcagctccattcatgaagccacaaggccacggtgaagagggccacttaaactccatgttgctgaaggctccttaagtgaagtgacatcccaaaccttccaaaatgagttaccctcaggcctggccacccccagaaccacattcagtccaccagcagttctgcaaagacaagcactggtcgactccctccccgccygccccccatggctggaggcagggcagccaggctggcagggcctaggcacagagactgtcctgggctggctcccctggcaccaaggaggcaggaagggcgtgcaggagaggcaggaccagaggagagggagccccaggaggagggcgccatgagcacggccaacactgaggcycctccgcaggcggacagtggttcctccacttcccccatcattccccttccacagaagtgcggtgacacggaagagaccacacagtaagaagacaccaggggctggggctccctgctcctctgacctgactcagttcacccctgggatcctcacgcagcacctcccaccagaggtgtggtctgaaggtagggagaagccaccatgaacccctcacatgaagcagaagtagtgtgcgacgtgcctacctggtggcccccggtaagcaccagatgaatgggaggaagggagtgaaggaaagagagagcggagaaaggaagggggaagggaggaatggaaaaagagggtgcaggagaaagaagggggaaagagaagaatggagacagtagggagagagggagggagggtaagtcagtgacagacaactcaacttaaggagcagcagctggactcccacagtcaccttgccctctccaagcccggggggtacaaagtccacgcccacaagctctgagcaggggggaacctgagtacagtgggctaggaggctgggggagtggagaggccgtgcccagcctgaaggggtggccacacaggaacatgggcacagccaggagtgcccggttaaaggcctgcctctgcttctttagctgtagaatggggatgatcacaggaagcaccacctcggaactgtctggggatcccaggagcaaagggatgggagtcgtctagagctgagccaggcctgtggtaagtcacatagaaatgtttgcttctgttgttattattagaaaatggatatccggaactttttaggggaatgctcccaactttaaaggcagacaacttactgaagctttaagaaaaaaaaaaaaaaaaaaaaccactgtgtgggccaagtaaaacacgtcagcagacttgacttggcccatgggtcatccgcttgcagcttctgctcaatgcgtccctgcgtccccgcgtcccccaaaggcaggcccaagtcctacaggggtcgaaaatcatgagtgagatttgagatcaccccattccaacacaagcgtccaagcccatgaatcccttaatgggaaataaatatttaagtcaacccccgcccaactcccacaccaaaaggacaggaactgctaattcttacccactacaaccaagtctccagttttatttcataggatggaaaaaaaaaaaaaaagacctattttaaaaagaagaagaaagggaaaaagaaaaccaacaaagacaaattcaaaaacgcaccactgttgacttgggcaacagcctctgccgggtcaaagaggaaaacagctcagtcctgaaatccgtcccagacatggaaattacagagcggcccctgctgacaccccctgccctttctgtgtcattccctcatgaggaatgcaattatatgccccccacggcaaacacgaaggaagacacgtcagtgacagccgcagcctgttcacgtcgtcctgcagagacagaggccgacataagcacttgcaggcggtggccaccagtgcagcaggagctgaaggcactgacctcagaggaggccgggcaggaggcaggggccgcaggcaggctggtggtgtggctgaaggtgctatattcactcccattttatagatcaggatgctgagggtatgcagaggagatgggatctatgtaagcttggcccactggatgcaaggcgaacaggctctcctcgcaccttcagggcaagcagttaaacagaccagcccctcacacactcactgggcagctgcggtgtggccaagccccgaaaggaacaggacaaagtactgggcgcaggctgcagatcaccacagatgccacgatgtgcccctggatgtccctccagcctccacaccccactgtgcacctcagccaccccagggcctctgcactcaccatcccaacggcctctccacatctgcacaggatcagctcctgcctccaggccacctcctgaggggcctcccatctctccaccccttcaccctgcccctctactgtcctagcacctgccacctctgaaggggctctggtgattggctgacacatttgcgggtgccacccccagtgaatgctcaggttcctgagagcagggcccatgttggggcaccctaggacagggcatggcatgtagctgacactcaacggtgtcaagtgagtggctgtgatcagtgcctacaagacccaggggacccctggggagatgggccactcctccacgcatggggcacgccacacacaggataccagaacgggcggccagatgagccaccatgaaggacactggaaatacgaacagctcatcttcacgaagcacttctggggttctgagccttgctctcaagttggttcatacatcctctcatggaatcctgaccacaattccaggtcataaacactgctgctaatctcatcttatagacgaggaaactgaggcagagacgtcacacaacttgcccaaagttacatatacatcagaaacacaaatgcaataagtgagatttcaaagatggcgggtgaggatgtacctgtgtgcacgtgcatacatgtgtatactgagagcacatgtgcatgtgcgtgagtgtgtgtgtacacggcatatacattgagtgcatatgcatgtacatgtccgtgaatctgtgtgtgcacctgcagcagtgccccctgagctgaggtttcactttctgcagtgtcagtgacccatagtcaaccgcagtctaaaaagattaggtggaaaattccagacaattctttagtcttcaatcccacactgtcctgctgcatcttgtccaggacgtgagtcctccctctgtccagtttgtccacactgcatgtcctagctgcctgtgagtcactcagcagccctctctgtactcaattccactgccatggtatcatggtgcttgtgttcaagtcacccttattttatgtataaattaaactttatcaccagtatgtacgcgtaggatgaaacagagtctatgtagggttcagtactctccaccatttcaggcatctactgggaatcttgacacatatcccccaaggatgagagtggactactgtataactgtgtgtgtgtgtgtatttgtgtatgcatgtgtgtgtgcacatgtgtgtatgtgtacactggtatgtgtattacatgtctgcacatgtgtatatgtatgcctatgtatctgtgtgcatgtctgcatacatgtgtatgtgtacatatgcatgtacaaatgtatgtgcatgtacatgtatgtgtgtatgcatttgtacgtgtatatgcatatgcacatgtatacacatacatgtatacatatgtgtgcacctatacatatttatgtgtgcatatgtgtgcgtgtgggtacatttatatgcatatattgtgcctgtgtgtacaagcaagtatatatggtatgtgtatatgtatttctatgtgtgcatgtatgtgtacatgtatgtgtgtgcgcatgtgagtatatttatatgcatgtattgtgcctatgtgtatacgtgtatatgtacatatgtatgcatgtatatgtgtatatgcacaagtatgtctacatgcatttatgtgtacgtgtgtgtgcatgtgggtatatttgtatgcacgcattgtgcctgtgtgcatgtgtgtatgcacatgtttgtgcgcacatgtgtgcctgtgtgcatgtgtgtatgcacgtttgtgcctgtgtgcatgtgtgtatgcatatgtgtgtgcctatgtgtatgtacaccaatcataacactcccttttctttcccaagaaaggatttctttttgtactgatctcaggagtttcagggctacagcgaagagatcacatgaggaagtcaagaattgtgtttacttacaaactatatggaaccaatatttaatcattttctacttacaaaatcccaattttggctgggcacagtggctcatgctcgtaatcccagcagtatgggagaccaaggtgggaggatcccttgagctcaagagctcaagaccagcctgggaaacacagcaagatctcatttataatctttttaatagcttttttaaatctcaatttcctatggctccagccagtataaccccaagactccaccttcgtggtggactcgaacctccaggtggcctgtcagcagcgcctgctcagatccagccttatttttagcactttctccagacaacccaagggaaaagaaagctgttttgaggtcaaacttctgaaacatctgtctctgtgacccggcctctgtgcaaacgccactactcccaggacatgaaaagcaccctgcagatgcccagaaccccagccaccacagccagcaggctgcacgtgcaaagaaggctctggacccaagctgcctggacggggcgcctggatggggcacctcttgaaccgctggggctctctcccagcatccctgcggcgcctttgtctcaaatgtggaagcagcagagagctgaggccaggggccgctttatttccctattgctttcaacatcttcttttgaaattctctttaaactgaaactgtcaaaagttgtgtctgataaatctgaaggttgtagaggaagtggtttgttcttcctcctgctcatgatttctgcacaagatagtacacagtacttggtgaactgtcaggcaaggcaagagctcccagtgagggccagaggaaatgcaggagatcactgaggcctgctctttacctgctgctgctgtcagacaccagacaaggtcaagggtgcagcagacaggaggaccccaaagaaggccctcctcatccctccccatcccatcctccaagacattcagggaaatgttcaaacagaactggcctggtggctctgatactcccacggcagcctggctgtcgggtgttattatcccattttccaggtagagtttaactaacgtaatcagaatgtaaataacatgctcaacttaatttcaataactaacttgcccaatgtcacacatagtgagttctctgaagaactgtgaatccacagttcaggcaaagcctgaacttaagaaggtctgactccaaagcctgacgtcacctgccctgggaagccctctctggcccctcagaccttgggtgtagtcaggtcccctcctctgtaatcttggtaacagtagcaatgacagtggtaacggcagtaataagagccctctgtttttcctgtatactttctctgtgtcagacacaaggctaacaccagatgtgcattatctcactgaatccttcacagaagcccatggagttggtaccgctatctgccccattgtactgatgaaaaacaaaagctcagagaggtgaagttacttgaccaaggtcacacagcaggcaagtggcagagcccaaggtagaacttccaacatgctgttttgattactggcctgggctgatcccagttttcctatacgtgacaattctttgcattatcttgggtctagatgcttctagtccagaatgaccccaagggctgccagcccctttgggtttccccaccaacgtcaaaggttgagggacagaggacatttccctgttggcaacgaactgggccccacactcctgatcagctcagccattgccaggttcttgggcctaaggttgatccaaatcggggcaaagaattaggtcctctcaaagcggagtaggaaagaacaagacgttcatggggccttcctgtaattcggcttccatgttgaagtccaaagtcccaaggccagcatgcaggcagctcactgcgtccgccctccacaattccaccagcccccagcccactcaatacacctgaggcctatggagcgtgtgccaggcctcaccaggcccctcggactttcccaatgctgtgttctgcccagaaagctcctccctgctttctcctcctggcctgagcggacccattcttggatcagcagccttctctccagggaccctgctgcttcccacgagtgcccaccctgagtcaccctcgtttgcgggcactggaaccgattgtccataact

SEQ ID NO: 97677 - DNA, 22689 bp, Homo sapiens
taacatccgattcaaatattcagcaacctgctgggttcttcaaagtgtgtttactgtgcactggttaccaattcagttcactgcatcttgggctgtacttctactacctgcccgagtctggtgagccagaacactcacatacacaagttacatgaagtggatttattactcacagagaagcagcaagggacagcagaaacctaggattcaagatgagctggtctctcaagactcaggaaagccacacggtgcagatcgagtctcgtctgtgcatgcccacttgtattctagctgggaaaagccgtaaaagcattgaaggacatcttgtttttagtgaggctagaacacagcctgggctgttctggctatttcctccttatctcagaatactatattcccagcacatcggaattattcttcagaactatgagcaagaaagtggggagaactgggccagtccaaggccgtctggagaaatgtcctgcagatatcactgggtatgcttgcacatctcgatcttaatatgtcctaaactgaatccatcatccccctggctcccagtgaaccttctgcctcttgtacatcttcacttgaagatgccattcttctcccagttactgagtctataaagtaggaagttatccttggctcctccttatttctaacacctccaccttgaaggtgacactgaatcacttggtcttgttaatttgttactctaaatatttctcaatttcatctacttgcttagttcaggcactcatcctctgattggattcctgcaacagtctctcgaatgattgttttgcccaaattttgcccgatctaaaaatcacattggttgctggatagacttctctaaatcacatatctgaccctactattctcttgcttaaaaccttacataattttcccatcattcacaggatacagtaggggcccctgtgctactcacgggcctcaatgatctacagatctcaatcctccagtaatgaaccactgtccttcccagcccacatgtgctgtttgttgtttcagtgcccttttgcatgccttcctctctgccaagaacagcctcttcacctcccttcctttcccaggagctgccatgtgtgcttcaagactttgaagaaggcttccattgacctcctttctcctcaaggtggcaaaaccaaaattcaaacaaacaagtaaacaaaagcagtggcagaaaggaaaagtaaccacagaagagaggagaatagatttagaccgtgagtttgaagacttagagacaaacttcccacagaaaacatcctgacctgaaaagaaaaatccaggcagaggaagattattcagcaggagggcctcagtggagggagggtgatccctttagaaggagggcctcagtggagggtggaagatccctttagaaggagggcctcagtggagggtggaagatccctttagaaggagggcctcagtggagggtgggtgatccctttagaaggagggcctcagtggagggtgggtgatccctttagaaggagggcctcagtggagggtgggtgatccctttagaaagagtcaaactgtctcagcaagttcttgagaacaacttcttcaatattagcaaatgaggtaccaaatataaaggtgcattttcagatttttaaaaattcacaaaaatggccgggagcagtggctcatgcctgtaatcccagcactttgggaggctgagacgggtggatcacgaggtcaggagatcgagaccatccaggctaacatggtgaaactctgtctctactaaaaaaaaaatacaaaaaaaaatttagctgggcatggtggtgggcgcctgtagtcccagctactcgggaggctgaggcaggagaatggcgtgaacccgggaggcagagcttgcggtgagccgagatcgcgccactgcactccagcctgggtgactgagcgagacttcatctcaaaaaataaaatggacaaaaatgttggcttttagctttgaaactaaaactgtttcttctgtgataatgataagctcagaaattgtttgtacaagagataaaaagtagaaaacaaaacggatatatgtaattataatcttctcaattattattggcataaacaacctaagatgagagttaatgtcactgccttttttctccttctagaagaatgagctaactaaatcttaagggaagctagattgctagatcctttttcagcccccagttcctatttagggagtatcactgcttcttgaactaaaaactactaagcaaacaaccagttggttataggaatgtctctgcttgttttatgttgacattttattcctttttttttttttgagacagagtctcactgtgtcacccacgctagagtgcagtggcatgatcatagctcactgcagtctcccatgctcaagtgatcattctaccttagcctgctgagtagctgggactacaggtgtacaccaccgtgcctggctaatttaaaaaatttttgaagacatggagtcttgccatgttgcccaggctagtctcaaactcctgggctcaagcaatcctcccgctttagcctcccaaaatgctgggattactatttttaaatttgaaagagttatattgaggtataattgatgtaccttaagctgcacatatttaaaatgtacaatttattaagttttgacacccatcaccacaatcgagataataaacatatatatcacccccaaaagtttcatgtccctttgttaatggtggagggtgtccagtttcttagcgtcttgaacaaacaattagacaaaacgcacaaagaaaggaaggaaagaagggtttcattgaaaatgaaagtacactctacattatgggagcaggcctgagcataaggcctcaaaatccccattatagaatttttgagcatttaaataccctctacttggggtacaccctatgtaaatgaagaggatgaagtaaagctacaaagtcatttagttggcctacaccctgtgaagaggatatttcctgtcattaccgaagtgtgaatcggccttctgttccctgcctccagaccctattttcctggctcatctgcccgctgagagatgtgatccccataaatctttatgggaggcagagggactgatggtcttttttctgtaactgcttcatgctggcttggggtgtagtccctacctactggtgatcatggaactcgccctgctctatctagtggaggcagggtagtttcttgatggctaggggtggtgtcttcacctggaactggctggaacctttgttgcatgatcatctgaagcttgatggtctccagacgagaggaaattaatttggttaaaagatttaatgggatggccgggcgcggtggctcacgcctgtaatcccagcactttgggaggccgaggcgggcggatcacgaggtcaggagatcgagaccatcctggctaacacggtgaaaccctgtctctactaaaaatacaaaaaattagccgggcgaggtggcgggcgcctgtagtcccagctactccggaggctgaggcaggagaatggcgtgaaccccagggggcggagcctgcagtgagccgagattgcgccactgcactccagcctgggcgacagcgagactccgtctcaaaaaaaaaaaaaaaaaagatttaatgggaacttcatggggtggatacctacgctgtcagagatgtttgttatagagatttgcagaaaaaaaaacaaaacctagtctgttctagaatctatgtttccttaaagtcttagcacaagcaactccattttggtttggtttggtttgttggggcctaatgcatgagcttagtccaaaacaatggcctcgcaaaattttgtgcaaaaaattccccctttttggtcaggttctcacttaggtgagagtgtgaccaaaacttagggccttagcgccactctcagttaccatcattttgggtttcggtctcagcacatcatttataggttttggtgttctcatggttgcacatttctttcagcttttgtcattccagttgaagagagaacatctgacgttctagagatgaccgcgtgcaaacatttaaaacctttgagagaatacagcacaccagggagactattattataaatattgggaggataacaccaagagttcggggtatgctcctaaacccaaggccccgataaaccaaacctcctaaaatcaaatagatcaaagaatgagctagataaagggtttactcacttgactaagcaatttcttcgttaatcctctaccactgaatttatttttttcttttttcctttttttttttttttagacggagtcttgctctgtcgcccaggttggagtgcagtggcacagtcttggttcactgcaacctctgccttccgggttcaagcaattctcttgcctcagcttcctgagtagctgcgattacaggcacctgccaccacgcctagctaatttttgtatttttagtagagatggggttttgccatgttggccaggctgatcttgaactcctgacctcaggtgatctgcctgcctcggactcctaaagtgctgggattacaggtgtaagccaccgcgcccagccaatgagggatacatttctaatcattgcttcttttacttcaaaccatggtaaaaggacctaacaaatgatgcctttctagaagagtgaaggcctactggcaatgttttctttaacccatgatgtgggttagaggagtgaaccaatgttttgtttttgactgattatgaagcaatgcatgtaccattaaagtttcttacctacttcgggccttcatcttttatctatcaaagtctaagtttatccatgtataaggctggctgcaaactccttcacaaataaaagtataccccataagtgcacataacagaccccttttccacttctattgtttgtagaggcataaggaagacaaaaaatattgaaagataagagtttcatggtagtagaagtcttaatctgtgaacttgggaaaagctgttcacatcaaggatgccattttcttcttgggagaaatttcccagggtagctttacctcaaaagttccaatgggtgcactgttccaaaagtgtggagggaccgttctcatttgcgagaccatgaacccaaagcccaaggtcctgaagttttgttgtagtgtggatgacaaggacagtcttctccaatgtttccagaaaattcaaaccataaaaagctttctttaccgggggaaaatacactgtagcataataatctactgttataacatcagccctcttgcatgggaaagcttttatacaaccagaatgacaaattggaattcaaataacaattgaatgaaatccccttacaaaatgtttaaatggcccacccggtgaccaaatgtacatgaagctttgtttgtcttcccaggaatatgggactaagcattggttataaactattttaaacaatttcagtatcagctggtttaatatgaaaatctgacgaagtattttcttggtatttaattaaatttttgcttgttttacttgggttagtagctttatgcaaggaaatttcattcaaagcaatgaaaaacaacaaccagggctgatactgactactaaaaactgttttaaactcagaaggaaaaataatatggatttcaggcgttcccaggttataaatgggttttctgcatgtttgaaaccaaaaacaaactttcctatagaaatatcagtaaatctagcaaagaaataacacaccccaaccgtgtcatagcctgtcttaaataagggaaaaacatgagagcactagtaagaggcaagtaaagggtgctttgctttacaattgatggaagctcgcaggctttgttcttggctgccccacgcagccagcggaaggcaggccaaggaggaaagagcccggcctcccaggtccccgcaactacaactcccaggatgccgcggcgcaggctccctgcgggtgcaggctgggctcagctccgctggacccgcgctggggaactctggcctcgctgcactcatggcttctcctagcaaggcagtgattgttcccgggaacggaggyggggatgwgaccacccacggctggtatggctgggtgaaaaaggagctggagaaggtaagcgcccaacgccgctgctccgtgaagtcagcctggagggagggacggcgggagaggactgagggctgaagtttgaataggcgtctaatcccctcyagcaaagccctgtgtgttttcctgcctctcccccgctgccttctcttaaagtctgagctagtggtcgaattttgactggtaaaactgcctggaagacttctctgagggctcagcctttagagttaaaggaacccctttgaactaccgaggctgagcccctgagccccgccccccgtatctgctgctggttcagatttgggacttcccagataattttacatgttcactgcttcccgcttcagcttttaaaaaattaaatatgctatacttaatatatacaaaggatatacgtaacatgcgtctacattatgaggcataatgtaatgaattaccaaactaaaacctgggacattgcctatacatcatcttccaaacgacccttatgtctacccatctcagtcccgtgccatcctgaattttttcatctgcttctctttttaaaattgaagtacttttcaacctatgaatataccttttaaacaacagactgttctatttggcttcttggtgagctttataaaagtggcatcttactgtaggctgacctgtgccgtttgatttttattttttaaccctcttctgtaaccaggcggtaagtcggctccctgggttgctgtcctctagagcgggtctccagaatagattgcagcgctgtggctgaaaaccctggtcagagttacaaccccaaaggtcagggctggagcttctgagagtatgctgtctccaaatttctgtatcacgttcctgtgccacgttttacctactccctggmacacagtctatttggctccaggtcagtctgtctagaacacatttgttcatgcctctctatagatgcaggcctgtagaggcaaatatgggtgtacaaatgcagatataggtctctctatagagatcagcagagctgcctagatacagaactacagatggagttcatgcgaaaagatggtcacttaacctacttcatttcataacacaagttaatactgaattggtaacgatcatatcaggtgcctcatttcttattagcaaagtattagttgtaattaagctctttattatagctttttctcccccctcatatcatagatacctggtttccagtgtttggctaaaaacatgcccgacccaagtaagttttaaacttgtttttaaatagcctcatcttgttgggttttgatattaccatttttgtggtagagaacaagaatatcatagtggaggaaccaaagatgcctatatacctaagaaagaataaggcaagcagcttggggaggagggtgtgaaccaaaagccatagaaaattctttttttttttttttttttcaattctgtgaatttgtcatttttatttatttatttatttatttatttatttatttatttattgatcattcttgggtgtttctcgcagagggggatttggcagggtcacaggacaatagtggagggaaggtcagcagataaacaagtgaacaacggtctctggttttcctaggcagaggaccctgcggccttccgcagtgtttgcgtccctgggtacttgagattagggagtggtgatgactcttaacgagcatgctgccttcaagcatctgtttaacaaagcacatcttgcaccgcccttaatccatttaaccctgagtggacacagcacatgtttcagagagcacagggttgggggtaaggtcacagatcaacaggatcccaaggcagaagaatttttcttagtacagaacaaaatgaaaagtctcccatgtctacctctttctacacagacacggcaaccatccgatttctcaatcttttccccacctttcccccctttctattccacaaaactgccattgtcatcatggcccgttctcaatgagctgttgggtacacctcccagacggggtggtggccggrcagaggggctcctcacttcccagtaggggcggccgggcagaggcgcccctcacctcccggatggggtaagccatagaaaattctagtaaggattaggaaagcacctgggcatggtaaaatttaattttcaactttgcaccaacttgatttttcccttctatatgtctacaaatattttcaggcagaatttgtgggtaytatacttgaggcataggtataaaactttacagcatctatttgaggtcctaatgtttaaaaatgtcatattgctacttttgttctgggtatgcctatgacttgtctcaggaatcccctttttggaaagaatgaataaatgtgaattttagaatgttgcaagagtttttttgcttttttttttgagatggagtctcgctctgttgcccaggccagagtgctgtggcgtgatsttggctcactgcaacctctgcctcctgggttcaagtgattctcctgtgtcagcctcccaagtagctgggattacaggcatgcgccatcacgcctggctaattttttttgtatttttagcagagacggggtttcagcatttgggcaggctggtctcgaactcctgacctcaaatgatctgtccacctcagcctcccaaagtgttgggattataggtgtgaaccactgcacctgaccattagctttttttttcaagtttgaaagtttacattaaaatttcagagttatattttattatttccttagtattttcttacaagaacatggtaaaccaaaaaaaaaaaaaaaaaagagaaaagaaaaactagttaccaaaactgtggacttggatctttcaagtagtaatacataaatctttggttttgttaatacagtctggtctcctgctgtggtcctgcagttttaaaagttgtgaactgctgaatagttgcctgtttgaaaggtggggcagcgytggattcagactgccactatcaaatgacagactttttctttaccctgaaccttaagttacagcacgagagagcatctggctgcccttcatggagacagagctgcactgtgatgagaagactatcatcattggccacagttctggggccatcgcggccatgaggtgcsatctttgttaaactgctatcccctttgtggsctccagtcatgcttgcttgagaaataccttgcgtrtatcttaaatttctgttgcagaggaaacagtgctgacctctaaagtggtaacataatctgtcctaattccttcctggttttgctagtggattgaaagaaaacaaaaaatctgctcttattgagatgcagtgatccttttaaagcataagtggctgcaaaccccagtagcttcccatcagtcagctctgattctgtctctacagactctccttctctcctcccagccaggtttactgacctcattgcagttcctggaacatgccaagtacatgcacatcttagcctgctctcatccttctacctgggatactctggccctagacactgcatggctttctattccccttgaagtgtctgctcaaatgtccccttttggtgaagccttctctaatcactccatatgaaatggcttcctcactctactggctcctatctcttttatatcttattatctgcagcactttttaccatctgacatcctgtttatttcttgtctgtctcctgccaatagaatgtagactccatgaaggcagggctttgttcactctggcactgaaaccccattgcctagamgagagcctggcatatggtagattgtgtctgcagtgttactcacctgcgaatccccagtccttaggattcgtatgcacatccctactgctctcattagaatattacatctccccttttagccttataaggcctagtgggtagggacttagctggctgaataarctaagtttagcctataagggttgagtttctttcatatttgctaggcaaaatgacaaaggataatagtttttatttgtcccaagcagtcacttaggctgtcacatgaattgcatgtcagggaatcttgccaaatttcataacctttcagccacactgattaaagttacaagagtrtttcaggatggaaccacaaaattatggtacactcccagtgtaagaatgttatatgctgccaggggttgtctggaaaaggaagagctccttgtattattgaattctgttccaactcaaggccaactgcatttttctcaagccattgattagtaaaggtgtgcctgcttttaaagatccttgaactcactgcaggattcttagcaaccttctaagaattgacttctaaagttaagggaggcaaggagaaaaatggatgccaaaacgattgggttaaggttgtagaatttcctattgacaaaatcatagaggactaccctacagatgactctaatcatgaaagggaaatcgtgcctttccaatggagaaatcaggtggatatcactttaagcaaatgatcaaacttaatctcaccaataatagactggcatcatgtgtcccctgatgtaatggcatgggaaggacacagcatcacctatgcagtatccttgccagaaatgtttacctcagtctagttaggaggaaacagacaatcctatttagaggataatgtacaagacaactggcctacactcttaaacaatgttaatgtcatttaaaacaaaaaaattttaaagtgactgaagagccatgaaaataaaatgcaatgcataatccttgactagatctaggattgcagaatgttttaaaggacatttttggtacagttggggaaaaatgaatacagataatattgctgtatcaatgtgaaatttattgggtgtaatagtggtaccatggttaagggagtggctttctcaggagatacatgctaaagtacgggtgaaatgtgacaaaattaatgaatctaggtgcttgttctttttttttttttttttttttttgagacagagcctccctctgttgcccgggctggagtgcagtggcacaatatcggctcactgcaacctctgcctcccaggttcaagcaattctcctgtcttagcctcccgagtagctgagactacaggcgcctgccaccacacctggctaatttttgtatttttagtagagacggggcttcaccatattggtcaggctggtcttgaactcctgacctcaggtgatctgcctgccttggcctcacaaagtgctgggattacaggtgtgagccaccgtgcccggcctaggtgcttgttctttcaacgtttctgtaggtttgatatttttcaaaataaatggggaaaaaagttcaggcccaagaacaaaataccaaccctaactctttcttggcacaaaggccccttgaaattattactactatgtgtctttccttatcccagtctttgctgagggagactgctctctgcaaatataactgtggtttttgccaataaaggagactcactctactggctcctatcctctttatatcttattatctgtagtacttttcacctagatctagtcaatcctagatctagtcaaggattatgcattgcatctgacatcctgtttatttcttgtctgtctcctgcttacttttaatggcaaaaactgcaattacttttgtaccaacctaagagttagctgggtgtctacttgccaggcactgtaatgggcaccaggaacacaaagatcartaggactcatgcctgcctttaaggagctgacaatttattgagagaaatgtacataagacaacacaaatgaataatataaggcaatgtggagtgtgtggtaacaaaggtacatttctggtattatacagtgtttcttaaaatacagttcacagaccacttgcattagagtcatctgggttgaaggagggatcacgccttaaaatgcagattctaggccttaatgccaactttctgaatcagagactctgggtctgagcctgagaatctgcatgttcaccaaccaagtgacactgatgcatactaaacgtggatggattacacattttttgtttattgggaaaggtttgtacaagtttcaactaccttgaaaaatgggtagtggctgggcgtggtggctcacgcctgtaatcccagcactttaggaggccggggtgagtggattatttgaggtcaggagttcaagaccagcctggccaacatggtgaaaccccgtctctactaaaaatacaaaattagctgggcgtggtggtgcatgcctgttatcccagctactcaggaggctaaaacaggagaattgtttgaacccaggaggtggaggttgcagtgagccaagattgtgccactgcactccagcctgggtgacagagtgagactctgtctcaaaaaaaaaaaaaaagaaaaatgagtagaagctcatccagtagccagggttgggcttatagttctgcagtttccttgccatttttcacatcaacctcaacagcaggtagcacgtgctttctgtaggctacctcaaatgagtttttaagtagtttattgactttttggtgatcagaggtaacattrtatattagctgacatcatttttgtttctccaggtatgcagaaacacatcgagtatatgctattgtattagtgtctgcgtacacatcagacttgggggatgaaaatgagcgtgcaagtggtaagtccaaaggtagaaatctgagcaaagcccttctctagacatggggctgtctgttyaggttgtaaaaacagtgctgtctttcagataggctaaaaaattctaatagcatatgagaaagatataccrcctatctttggatataagtttgcactttgatttcttcccaagctgtaagtctagaactgaaccctagaggcctggttttagttgaascatataccacctcttcacgagtaactgtggtatcaagccctacagatttgaaaacaaaagaagtgcttctaactcacacggaggctctgctcctttgcgtctctatgtgggtcgccagtaggtattttagaatatctagaagggagattatccatgggyactgaaagatcatttttktttccccataggatacttcacccgcccctggcagtgggagaagatcaaggccaactgcccttacattgtgcagtttggctctactgacgacccgttccttccctggaaggaacaacaagaagtggccgataggttggaaaccaaattgcacaaattcactgactgtggccactttcagaacacagagtttcatgaactgattactgttgtaaagtctttgctgaaagtaccagcatagactgtatgatttctgctattttgcatcccartataggagtagaataatatctactatcagctgattactagacrcatagaacatccagttaagttccgtaagtgcctgaaaaacaaacacaagtttcaacattcaatctaagttacaaatagcacttccattttccatagactctaaaactccccaaattgctatgaactaccacagtattttcctcatttgataagaaacataaggacagcttaactacccttctctatccgaagtgagtcagaaacagaacccaggtttcttgattcccactcctgagtaaaattaaataggttttatgtatgttgcaggtattgcacacttttcctctttgaaatcaaacttttctatttcactggggaaagaaaacatgactgaaagtccagagtgttagcttagagctcaaaatactagctgctgtttcaagctggccccagacattaaactcagactagggccttcacctctgacacttgcccctaagtccttcagacatgttgagagagactgagacaggagtcttccggagtcaggcaggaaggagaagcacagcaatatacattcataatatacgtacaactgactagatttgtttgagacaagagtggtgggatcagagccatgtggagagctcatggcctgtctaaattgttgccatgtggaaatggggcagagtgttgccaattttctgattttttgtgtggaaaaaaatctccaaattgtagtttttaaatttggggaatgcaaatatatatatatatatacacacacacacacacacacatacacatacaatccatatacatatggagtatgtaagttggcaataacagtatacatcaaaaaatttacaaacactgcaagacaaataaaatccaagccatccatttgtgaccacagtcataagcattcacttagccaggggcttttagataattgtctgtgaagtctgagaaaagactaagataaccaagatgaacataatgtcaaaggacgaaatcatggggacaatttggattttgttccaaaagacaagtgtttttaaaaagaacctttccatacttcgtgttctgttctatagagttaaaccttttaacttccatggccctttagatctctttcaagcacattccattttcttctgatcatacttcctcagaaaacctttttttggctgggtgtggtggctcatgcctgtaatcccagcactgtgggaggctgaggtggttgtattgcttgaggccaggtgtttgaggccagccagggcaacacagcaagaccccatctctacaaaatattaaaacattagctaggcatggtggtgcacacctgtagtcctagcttcttgggaggctgaggcaggattgcttgagcccaggagtttgagccttcagtgagctatgatcgcgccactgtactccatcctgggtgatggagcgaagaacctgtctcttaaaaaaaaaaatttttttttaattaaaaaaacccaccctttttcatttcccaacattttttggctattatgatcgctatgtgttmcttcaaataatttccagtgaatccacacttgatgttgcaaagcctaagtttgctgcagaaatacaatttcctacacttcatacctaaaggagattcagagctatcgctcaaaaccaaaagtcttggtttttaaatgtgcttagacaaaaaaaatcaggaaaggtaccctaatcgttcaacagcaatcatctttggggaatgggcattttggtaggtaaagtgtggtggacgtccttattattatttttgagacagtgtcttgctctgtctcccaggctggaggtcagtggcacaaatctcagctcactctaacctgcacctcccgggttcaagtgattctcatctcagcctcccaagtagtgtgaactaaaggcatgtgccaccacgcctggctaattyttgtatttttagtagagacagggtttcaccatgttggccaggctggtctcgaactcctggcctcaagtgatccacccacctcagccgcccaaagtgttgggattacaggcatgagccaccatgcccggccccttattttactttatcctcctgattatttgaatttgttacactaagcatgtattttataatcaaaaataattaagatttaaaacaatgtatttgactactaaaaagcaaattatataaatcagttgaataataatgttgttaaagaggctgtttagcactaatttgaccaaatctatagtcaaagtttgattctacttgaattttttggaaatttgctgttgtattacttattctttgccttgttctctgtgaagtcctttcctaaaaaagaaacttatacaatttagttcacaaaactttgttgacctctttctctgtagaaatgaaaactaaatatatataattgagaaataattctgatactcttcattcctataaaagtaattaagatagacctataggattgttgaactttgctgccaaatatagtaaccagtaaccacagctagctgtaaaattgaaaattcagttcagtcaaactagccwtatttcaagtgctcaacagccactggtggctattggttaccttactgaccagccaatatargctatttccgtcattatagaaagctctattggacaacattggtctaggacatatattttgtattttcccctcacccaccatccaataatgagtaatagcacaaagtaaaagtgacttaatttgaaattacttctgtttggctagtttgcttagctgatcaccaccaacatcataggtctataaatcacccaactaagatcaggggtgtttcatgggaaaatctacacaaactattcattaaaaaccatagagccatggactgtcatttctgatttctgtttgattctttgtggtcatcattgaatatacaggggcctctatacactctggggagtatctattctcaggtgagcaaaataccgaatactgaatggaaatcaactgtaagtattaggacttcatatgcaacttgaatttttggtgctgtccggagtctagagccccacaatctgttttggttacagtttatccctgtaggataaatgatccatttaactattcatcagaggtgctgtaattttaaattgtctcttgtctccttcagttaattttcagaattaaaaacataccatgggaaaaaagcttgaagtttctctttattggtgaggtaaggaatacttttgttttagccattgaatgttaagctctaaaaaccaatctttagctataaagacataagacaaagtctatatttaaaacatacaagctggtttcttctcatttctagctctcttccaagttcatttttcttactacataaaactagtgcctttttgataggccaagtcccaggaaggacagacattgttcttaccattccaactctcactgagggtggaagagaaaccctctgtctgtagtttcaggttcccagatccttcatatatatatatattatatatatatatatatttatatatatatatatatatttatatatatatttatatttatatatatttatatatatatttatatttatatatatttatatatataattttttacagtccagagatcttttattaacacttattatgccatgaattcatacggaataagttccagcagctcaggctccttcccattggttctcacaaagtgtgcttctctgggtggagcaggctggcacttcagttgaacccaggtaactttctctcttttttttttttggagacggaatctcgctgtcaccaggctggagtgcagtggcgcgatctcagctcactgcaacctccgcctcccaggttcaagcgattctcctgcttcagcctcctgaatagttgggactacaggtgtgcgctaccatgcccagataatttttgtatttttagtagagacagggttttaccatattggccaggatggtctcgatctcttcacctcgtgatctgcccgcctgagcctcccaaagtgctgggattacaggcgtgagccaccatccctggcaaacccaggtacctttctctttggcttcttttttttttctgatcattttcctcatgcatttcaggaagctatctcggctcttagagtgcttcatgtgctcagtatgcacattaatgctcttggcaagaatattgcccttgtttatttacaacaatgccaacagcatgctgggtaacactgtagactcttccagttttgccatggtaacacttgtggggcattcctttttgaacagtacccattcccttgatgtctacaatatcacctttcttatagattcgcatatacgtgaccaaaggaacaactccatgttttctaaaagtcctagagaacatatatcgggtgcctctcctctttccgtttgtgttcatcattttggcaaattactggaagatgggggttctggccaaaaggctgtgtatcttatatatgtatgtatattcaatacttgaaataatttttgttacaaagagctagtgtcatcaaatgctaattcacagaatgtggcctgaattttattttactgataccatttatcttaaaataactcttctgatatccacttagagcatctccaaactggtattagaacccaaccctcagtactagtggagcttgaattcctttccatgggtcccatgtttttggcttggatacagaaacttctaagtggagctacaaagtgaaaatatgaagctgcaattctaaaaagccgcacagtcaacttctgtgcaacaatacatcaaataacctagtgttttctatgtggctgaccataggaactgaaagtgttattagaactgaggacaattataatggctttctgcttagacacatcacaccatgatttagaacagaataaggaagggaaataaatctaaaacagagtaagagaaaaagaatgttatcccctctctcaaaataaagtgtgaatggagggcatggagtatatttagtttcagttaatgctataacagaataccatagactggtggtttatcaacaacagaaatttatttctcacaattctggaggctgggaagtccaagatcaaggtgcttacagatttgttttctggtgaggacccacttcctggttcgtggatgtttgtcttctccctttcacatggcagaaggggtgatggagctctctgggtctctttatataagggcactaatcccattcatgagcgctgttactctcctgacctatcacttaccaaaagccccacctccaaataccatcacattggaaatgagatttcaacattagaattctgggggcacacaaacattcagtctactgcagacattaaataagaatctagggtaaattctaacaaagaatacatttgagttaaagagtgaaacataagactttaagaaagaaggaacagtgaaaatattctttagaatgaaaatgatagtatttatgtactgaaaatatgtccttgacagtagtcattgggtttgaagtaagtatggtagcataatctcctaaaagaacatttctgatacaaaaaggaattaatattgtgcggaaaaggcatgttccactctcccccagtcataccccaagtttgcactctttgctattcctgcctttaaccccttctaatttcttttcaatgaaaccactgagaaagtaggaaacagaaaatggtggtagtgaaccagatataaaaaaaaacttccaatgaagaacttaataaataactttaaaaagaacatttttatactctagccattatcatagtacttggtaaatacgggtatgttggcatctttttccttgacccatcagaagtcttgaaagatgtggtcctccggagtttcaaagtgtttttttattaatgaatttcactactaaccttatttctttcatattctactggctattttaccaatataaatttagtcttcataaataaaaaaaatatgttttcatagcagcaagtctacgtccattattgtgaagtttgctttcaaggagatttcgtgttccatcatgaattaaattatctgctccctaagtaacttcatttgcaaaatgtcaataaagttcatagctctctattaaaattcgagccactctgtcatgtaaatacagttagatggtgaaatctcaccaccttcgtggcagtcatcaaaaacctttaaaaaagaaagaaaaattatattcaaattaaagttttaaaatatctaagacccaaccacttatttaaagcaagattaaaaacaaaactttcaaactgaaagggactaggactgtacttaagaacatattatagccggacgcagtggctcacacctgtaatcccagcactttgggaggccgaggtgggtggtcaagaccatcctggctaacatggtgaaaccccgtctctactaagaatacaaaaattagctgagcgtggtggcaggcacctgtaatcccagctactcgggaggctgaggcaggagaattgcttgaacctgggaggcagaggttgtagtgagccaagatcgtgccactgcactccagcctgggcgacagcaagactccatctcggggggcgaggggggagcgggaagaacatactataatagggcctgctttgtgatcatcaagttaggagtagtagagaggctttttttactgtggcattaagatgaccatgctcacctgtctgctgggcaaaaggctatcaccaggtaacacaggaatatgggcagggagacctatacatatgaatgacttaattttgattaaccaaatgtttcatgtttagctacctttttgtgaagggtgcaaaacagaattcctaatatgttagccttttgtctagggactgaaaccaaggcatagagagcttaggcatatagacaaaggttggtataatgaaataaaacacacacaggctcatctataaatgccatgaggactgggacagtgtctcttgctttctcttgtatccttagtgcctagagcatagagttggcacttacaatatttgggaatgaatgaaggaggagtgctggggcatgctgcaggggaaagacatgatctctgggtttgaatcccggttacttctaagctgtatgcccctatgtcttcctaagcctaagctccctcacttttaaggggaaataacaccactagcttcaagaatgtaaggaggattaaatgagaccgcctatggaaatcatcaaggacatatctggcccaaggtaggttctcaacaaatctcattttctgccctatttaggtgaaatgattagccctcatcaaaaagtgtccatttcaaggccaagagcagaaaacgtaaatatccttaatgtggttgttccaagaaagaatgtaaagcagggggccaggtacaggggcacatgcctgtaatctcagcactttgggaggctgaggggatcacctgaggtcaggagttcgagaccagcctggacaacatggtgaaaccccgtctccactaaaaataaaaaaaattagctgggcatggtggtgggcgcctataatctcaggtactcaggtggctgaggcaggagagctgcttgaacccgggagctggaggttgcaatgagtcaagattgtgccactgcactccagcctcggtgatagagtgagactccgtctcaaaaaaaaaaaaaaaaaaaagtaaaggaatgatgtgttcattaaaggtctgttcatcaaggtttcatggaggtttgaatagctcttggtcaaccctaagagtctgagaaaactgggctgtgcttgctctgtttcttaatgtggcacttgcacccgtgggcagtcaagtgtaaagtgaagccactttaactcaccgggcagagtccacagggtgcccggaccaaacctgtgggagggatgattggattgactgccctgtacagtttcatgtgtccatctacactgccaactgtgccttcttttgcagcaataatcgtcatctccacttttccatcataaatgagtgtattcaggatggtttcaatgtcttccatggataactctacctaaaaaagggatacatcagaaaggacacaagtaggatagggagacatccacttggagggtgttaaaaacagtaaagggttgctgggcgcagtggctcacgcctgtaatcccagcactttgggaagccgaggcaggtggatcacttgaggtcaggagttcgagaccagcctggccaacatggcaaaaccctgtctctactaaaaatacaagaattagctgggtatggtggcaggcacttgtaatcccacctactcgggaggctgaggcaggagaatggcttgaacccgggagacggaagttgcagtgagctgagatcgcactactgtactccagcctgggcaacaagagccaaactccatctcaaataaataaataaaacagtaaagggtcataattctgctgtgaaatgggagaaacattatgctggggtggagtaatttaaagcacaaagaggaggaacaataggccaagttagcacaaaccactgaggtgccagggacagaactctaagctcatgctgagtttgacactttctggtatctttacttcctaagtaaaatcgagaaatcttataaaaaataacatttctttagcaggaatttattggagatttataaaatgcttgagcagaaaggcactttagacatcaaatagtccaagttcctagtttttatgagaaatctgaggcccaggaaattaaagtgacatgtccaaaatggccactttgatttcttcactgtgaaaagcatcagtgtccttaaaaaaagaatttcaaaaggctagggtacagtggcactttgggaggccaacgcaggaggatcacttgagtccagaagttcaaaaccagcctgggcaacaaaatgagaccctacctccaaaaaaataaaaaaagcatcagtgtcccaagctgagtatcagttcagacaatgcccaatggcagtgactgcctttgcctaagatacaggacagtattttcccaaagtggattctgcagaatgttcgtagctatcatctcaaaaaaaaaaacaatgtgggtcaaatacatgtttggaatacattgtatgtgacaaagaataagttttaaaaaataagatgaaattcagttctgaccttactgat

SEQ ID NO: 97678 - DNA, 95670 bp, Homo sapiens
tcataggaggcagggatgatacacaggacaggtttatgtaattttgtattagctttattcccaacacatacgtttgcaaataataaacattttcttaaaattaaaaaaacaagtacttacccagcattctgagagtcctttattctatataaaaggcccgtattgctccttaagagatccaactgaccctagtttttaagacagtagaaaacaggagtcagttattttggagatatgttaaatcaaatgacaaatgttgatgcattctttaacattcttaatttttcaaaacctgctctttaatctcaaaatttttcaaaatatcactaacaatttcctgtaggctagatcttggcttggttatatgatcaatgcataaagaatttttaaaaagcagcttgagaataacaatctatattaaaaatcaatataaatccaaattacatatataaaataaaaatataatttatataaataaaaagttgaaataaagactaaataggcatattctgttgcacagtgaaaaataaaatttataaagttaatggctgggcgtggtggctcacacctgtaatctcagcactttgggaggtcaaggcaggtggtccatttgaggtcaagagtttgagaccagcctggctaacatggcgaaaacctgtctctactaaaaatacaaaaattagccaggtgcagtggcatgcgcctgtagtcccggctacatggaaggctgagctgagatcgcaccactgcactccagcctgggcaacagagcaagactccatcttgaaaagcaaaaaacaaacaaaacaaaaaacaaaaaaagttaacagtgacatttactgaagtcagccaatgaataaaaggactagagtagtattgtttttatatagcaaatcaaaagtaaaataaagtatgtctgtcatgctcctgaatttccttgggtccgaacttaagagaacccagataattataccactaggctctggaagtactagaaagccacagttgagagggacgctattcccttgtttatttatgtatttatttagagacagagtctcactctgtcacccaggctggtgtgccgtggcacaatctcggctcactgcaacctctgcctcccgggttcatgcgattctcgtgcctcagcctcccaagtagctagcattacaggtgtatgccaccatgccacgctgatatttgtattttagtagagatagggttatgccatgttggccaggctgatcttgaactcctggcctctagtgatccgcctacctcggcctcccaaagtgctgggattactggcaggagccactgtgcccagcccattcccttgttttaaaacagacactcatgacttggaaatggatttacatactgaatgaacagtgacacactcctgttccctgaccccacgaagtggcaaagtaggactacaaggcccaatccagaggctctggtcatttatccagcttatgaatatttactgaatacttgtactgtgccaggtgttatgataggtgtttgggggaacaacattaattctaaaagggaaacacacaggtgacttcaatacccatctggttggcattaagatagaggtaagtaaagccaccctgaactcccagattgggtactcggagaacaggctgcggcccaacctgggggggttcagtgacttcctggagacaatggcagagttgagtcctaatgcgttagtcatctgtaaagaataagaagaaccttctaagcaggggaacaacatgagtcctgtggcacgaaacagcatgatgtggccagaaaccaaaaacaatctgctcctcctgaaacctaacttttgaagtagagtggtggagatgaggctggtgaacaatgcagggactcagtgtgggaaacccaggagtttgaacttgaatctccagtataaacaaattgtaggtggtagagtgccttggtcagacctgcatttaagacagatcaggggccaggctcggtggctcatgactgtaatcccaaatcaggctggcttctctgagacagatggagtcatggaaaccagttaagatgctactgcagctgtccaggtaaaagccatgagcctgaacatgatgcagtaccagggatagaaatggagggggtgtggacagcaaatttaagaactgtttttaagagctaaaatcagaaacattacatgatttattaataatcactccctttcttaatatcctttgatagctctactactgcctgcatacaacctatagccaataggactcgcagtgggtgggtggtggcagaggtggtaaaagagaggtgctgaagatgattttcagtcagaaggaaagagctgagagggcgatcagaggaagaaaagaactttttccactgctacaacctcccagaatcccttcctctgtctttcctagagctgaagaccttcaccacagtgaaataactagaaatcagcaacattcctttgtccttgggctagaacaggggtgagcaatctgctccacagcttgtttttataaccaaagttttgttggaacatggctgtagccatttgtttatgtatcatcatccatggctgcttcttgctaaaatgacagtgtagttgtgacagaaatcatatggctcacaaagcctaaaacatatactgtctggcactttatagaaaaagtttgccaactcctgagctagaaaattgatgggaaaggtttaagaaaagattcatcggaccccaaatctccacatccagagcccttggaaatccaacaaggctagtagacttaaaaaacaaatcagtcattcagatgaggccttggcgtagaactctttaacctaactgctactaaagccaaactgaaatgctcttaggaaaaggatgttttggtgatgagggaaagtaagggagatttagagcatcggcaccacttggtgggtttttagacagtcttgcttgtttgtttctggacagatggagaatggcttcactgataaattccattgcaatgtcactgggggctaaggctgcacttcctccccaaagcccaacattcttcattcaactggactcattcttgcttcctgaaatgctcagagtgacaatgtggagaatgaaaccctgatgactgggctctgtgacaactcataggaaaatcggggggtggaatattttatgggaaatggcccaacaccagcagtaggaagcaaacagaaggtgagaacagactagacctatgtatggcagtggcaattaataaatacaacagttataccataatacatttatttcatttgtcttataacgcataattatttcttcttttttcaattcaggtagtttgagctgtttcctggtttagagtcttatcagtcaaacctaacacactttctcgttttatgactgctgtattagggttctccagagaaaaagaaccaataggatacacctccctcttgaaagattcatcagaagctatttgctctgtgattatggaggctgaggagtcccatcatctgccctctgcaagctggagacccaggaaagctggtgttgcagatcaaagggctgagagcagagagctgatggtgtagataccagtccaagtctgaaggtctgagaaccaggagtgctgagggcacaagattcatagcccagctcaagattgaattcaaagagtgaattcaatcttcctctgccactttgttctatttaggccctgaatggattggatgatgctcacccaactggacccatatctactttactccgttcaccaattcaaaatgctaacctctttcagaaacacccacacagacactccaataaaatatttaactagatatgtaggaatcctgtatcttagtcaagttgacatgaaattaaccatcacaactacataataaaaaccagtgataatcagcatatcagtaattatgcaaaatagttagattcaccttaccatagacaacaacctattgatggctactgcccgctgctgggcttctatatgaggcatttcattctgaattacttggtctgtgattccatgagggaactggtgacataattctataatcctagaaacaaaggtattaatgttatccttcatggttacctgtttcaagagacagtgggggtaaaaatacaagtagaatagtttgaaactgtgcctttttcacatttggcagacaatctgggtttctgtgatggttttggatcaaagcatgttagaaattgaagaagatgatttctaaatacatgtttacagtattattgttatttaagaatatttcttttcctcactaataagaactttaaattagagcaaaagtctaatgaaatcacagaaaaaatattaaagctgagacttcagttttctcgggtgtaataagcatgacaaagttaagccataaatctgcaagcaggaggcaaatgcagatgtttctggtaggaagccaaaatttgttatgacaattcaccataatggggcctgtttttggaattatacctaccaaacaaaaaaagtcaaaatcttcacctagtcgacatcaacaaatgtattattcctaacagtctgagaaagttgagtcttttaaaactacgtgaaaatctaagagtggcagtgcctcggtaaaatataaaactgggccgggcgcggtggctcacgcctgtaatcccagcactttgggaggccgaggcgggcggatcacgaggtcaggagatcgagaccatcccagacaacatggtgaaaccccgtctctactaaaacataaaaaattagctgggcgtggtggcgcgagcctgtagtcccagctactcgggaggctaaggcaggggaatcgcttgaacccgggaggcggagattgcagtgaaccgagatcgcgccactgcactccagcctggcgacagagcgagactctgtctcacaaacaaacaaataaaaataaaagtggcagaggctttgggtgtcctaaaagtcttgagttcaatactgcactgaaaccacctggcttaatgttacttcgtaatcaccaactgcgccctaactccgcctaaacgttttgtcatagacgttcccttagtgacaagagcgatcctggatcagaacatgtattcacaagtgttctacagggaaagaaagccgagggctcctctcaaagcactgatcgcgtcaaagtaggaaggcagcacgtcatcacaacttccccaaaagtatcagggcaaagccagccagctacacaaagttgcaagctgtcaaacccattttgaacttcttgagttctgctctcccaggatgggaaggaacaagtgggtccagaaccccgcaatcgtttttcccgcgtgctcacctaacccgctccggccactcccaagggatcccggagaaggggtccagctgcccaaatgactgggcgcctgatggagtgccaagccggagcctcactggtttacctgttttctatttcgaccggatccgcgtcaggcggctgcaccttcaccttcacctccgccatgagggcgcagttcctgacgcctggggggaaagatgcacggagcagcccggtagcaagccggggaacccgggtaaccagtggaggatagcgctctgctgaggccgaggggccttcttcctcgtgtcgcagccggtccttccttgcctttcggcgggaggtggccaagctgcgcctgctccggcccacttacaggcgccgctacagcttcttattcttgttttccagaatgtcaatgcccatcggacgcacaagcctggttccttcattctgagttgggaaaccaacttttagcacttggcaactctgtgaaggaatattcttagatgcctatgggaaagcactgggaaaggaactccaggcgggtaccaggctccctgcggagcggcaggggccggtctagttgctaagaagctgagtctccaccaatcatctgcccagcacccagtgggcggggcgcggctcgccgcgtctgtggtaacccgggcggcggcgaaggaggaggcaagaggcggtgagaggctggcgactgggttgggcgcggcagagatgcattaggggtcccgatcccgggccccgcggttagaggaagaggagggcggctagaggaggggaagagcttcccttactccagccgaaaggatgcaggtgtccttggcagcccctgatgggcgggaacaaccaaacgggattccggatccgggctgcgagggggcggtccacgttgggagagttgaggggtctggggatcctgttgactgcacgttgccatttgggcctggcggatccgccttttttcttgattccctttgcgtggggcccactggccaccccagcttcctaagggcagctgctagttgacgctcgcgaattacttcctctcctacatattttttatttagaatttttcaactacttttattttatctgcctttcacttaaatggaaatgcgactatgggcaagtctcaagtccagccacactcccgtaggagctattgttgtgctgtcagtatctgtagtttatattcttggccctagatccggaactatccaacaaggcattaagttcaccccttaaatttaggtaccccatttttgagaatacagtctgtgacaaagctcaaactgcagacatgttcagatcagcattattagaactgcaacaggcaaaactaaaaagaaactagaaatagcctaaatgcccagccacaaatggataaataagtacagggaaaactaaataatacagtgagaatgcaagaagtagactataaaaatggaatgaatatgtagattataattgggcaaaatctatggattattaatgaaatttgaaaaggcaatacagagatgtaaatggttgttgtgttaaggtgagcgttttttccccctgaaaccttctgtgcattaattatgacaaccttcctccccaccctcacctccaaaaagaccagtaaggctttcatactggtagttaattattaataccaggatttataaatacagtagatgaaacgggaggcttgtgtttattggtcactgtttatattcttgcaaacttcctttccactgagaagtagtactctgcagtccttctaaagtgtctttgcagctttcaaatactagaactgctctggtgataatggcaaggctgtgaacccggagctttcccaaaaaagttagctctaactaacattttgtggtacacacagaattacttctgttccccttgtatgatgacttgccctgaagccaagagagctgacacacaccagaggcaggaaaaggcgataatgatttacagggaactcaagtcagagcgttagtgatagtctctgttttgccttactcatttaatttgtccttttaaagtaacttctttcttttccccatctcattcattcatgctcctttcgcagaagtgaggtatttagataatcaaaaccccacacaagacctcaacagcaaatacagatgaaatgtaattattatttcaattaaaaagggaataatatttgtagtgccatgttaacagtattctctcgttttaactagttttgctgcatttaaattaagtgctgctcttcagcttttgtgtacagctataagtgcacattggaatttatatgtatatatatakakakagagagagagagagagaaaatgactgctggttcagtgtgtgtccctcagatcataccaytacgagtgcctcagcctggaaaagctaaccatgaaattgataacaatacgcttttggaaatgaaatcaggtaagaatcacatatgtttgaaattgtttaaaataacattgtcatatttcttgtgttatctggttgctggtttatctctttgcctgctttctcactctttgctcagctttttgggaaatttgtaaaacttctaaaatttgaaacagtgctgtacattgatggtttatagagtggtatacatttagattaaaatggttagctttgaccaacctttcatttgtatagtttcagcaatgtcttgacttaccttagccaaggtaagatgtcccggtgctggccgggtgcggtggttcacaccagtaatcccagaactttggcaggccgaggcaggtggatcacttgaggtcaggagttcaagaccagcctggccaacatggcaaaactctgtcttactaaaaatacaaaaattagccagacatggtggtgggcacctgtaatcctagcaactcaggaggttgaggcaggagaattgcttgaacctgggtgatggaggttgcagtgagccgagatcgcgccagtgcactccagcctaggcaacagagcaagactccgtctcaaaaaaraaaaaaaaaaaaaaaaaaagtcccggtgctccccaaacttttccaatatgctcattatttagctagtataataaatttgacctactgatacaggctttccagtcagacaggttggagacttaatccctgccttgacaacttctagtgaccttgggtacattacttagcctttttgagtctgttacctcactgtaagacaggaataataatatctacttcttagagccattgtgaggataaataggttcgtgtatgtatgaggtgcacagggtttggcatatagtaatgtgaaaataaatctcaactctaactacagaaataaagcagtgagggccaggcctggtggctcacgcctgtaatcccagcactttgggaggctgaggcaggtggatcacctgaggtcaggagcttgagaccagcctcctgtctctactaaaaatacaagattagccaggcatggtggccaatgcctgtaatcccagctactcgggaggctgaggcaggagaattgcttgaagccaggaggcggaggttgcagtgagccgagatggcgccactgtactccagcctgggagacagarcaagactccatctcaaaaaaaaaaaagaaaaagaaaaaagaaataaagcagtgaatgtatatcctgctaatacgtattcttcaaaatcttaaatatgtgtgtatatctacacatacacatatatatacatacacatatataattaacataaggaaggaaagtttcacaggtaaaacatatgaacaaatagatgtgtaaaaaagactttgaaattccaatttttgccttttttttaaccaattatatattttaataactgaaatgtgtacaaactatctgcatttatgttatgacccctgtgctgcttagaccaagagttctaactaagcatatgtattattatctgtgttctcctttagcttaaaagctgatacaattttttaaactgtcaaaccaaattaaacattttaatgtatgtgcccataattcttaggagaagttgggtgactattgacaaaagatgatatgaatggtagggtatcaaaattccctaatatgtaaatatcaaataaataaatagttttcacaattcagtaacaaaaagaacagtaacccagaagaaaaatgggcaaaggatatgaaaagacctttttttgttttttcttttacaacttttattttaggcttgggggtacatgtgcaggtttcctacctgggtatattgtgtggtgctgaggtttggggtatgattgaggccataacccaggtagcaagcattgctgtaggttttcagccctccccaccctctggtagtccccagtgtctattgttcccatctttatgtccatttgtacctaatgtttagctcccatttataagtgagaacacgtggtatttcgttttctgttcctgtgttaattcgcttaggattatgacctccaactatatccatttgctgcagaggacatgatttcattcttttttatcactgcatagtattccatggtgtgtatgtaccacattttctttgtccatttcaccattggtgggcacctaggttggtttcatgtctttgctattatgaatagtgctgtaaggaacatatgggtacatgtgtccttttggtagaacaatttattttcctttgggtacatacccagtaatgggattgctagcttgaatggtatttcaactcttatttctttcttttttttttttttttttttaagaccgagtcttactttgtcacccaggctggagtgcagtgatgcaatcttgggtcactgcaacctccgcctcctgggttcaggtgattttcatgcctcagtcttcggagtagctgggattacagttgtgtgccaccatgcccagctaatttttgtatttttaatctgcctgcctgggcctcccaaagtgctgggattacagatgtgaaccaccgcgcccggcctcaactcttatttctttgagaaatttccaagctgctttccacagtggctgaattaacttacatccctgccaatagtgtataagtgtcccttttctctgcaacatctgttagtttttgactttttaacaaaggccattctgactggtgtgagatggtgtctcactgtggttttgatttgcatctctttgatgattagtgatgatgagcattttttcatgtgtgtgttggccacttgtatatcttcttttgagaaataatgaaaagacattttgtaggaaaggaaatataaaggtctcttaaacatatgaaaatatttcttctccttacgcttctctctgccccttcgtctgcttgctgagcagaacttatccctgcttcacctccaagcacttaatcaccacctgacaaactacatttccttggttgtttactgtttcagtgtccttcctaaaacataatctccatgagagcagggaccattctaggtacaggggatatgcaaggagcccctaagatatacttttgcatatcccctatacctagaatgatgtctggtacataataggtattcagcaaacattcattktaatgaattagtgagttttactcaaaatgcaagaaagatgaattgaaactacaagatagtattttttttaacctaggaaattaggaaaactaaaagaaaaatggataacacactagatgaggaagattgtggtcaaataggtgttttcatgcattgctggtggcagtgtaaattgcttaaccatccatggagggcagtttggaaatattaatcaagattacaaatgctggcagggcatggtggctcacacctgtaatcccagcactttgggaggctgaggtgggcagatcacctgaggtcaggagttcgagaccaccttggccaacatggcaaaaccccgtctctactaaaaatacaaaaattagctgggcgtggtggtgggtgcttgtaatcctagctactcaagaggttcaggcaggagaatcgcttgaactcgggaggcagaggttgcagtgagctaagatcgcaccactgcactccagtcaggatgacaggagtgaaactycgtctcaaaaaaaaaaaaaaagattacaaatgcatgtatcttttgactcagcagtaactagttctacatatttgtcttgcccatatatttacagaaataattctttacaaaattatttattatagtgcttataattgcaaaagaaacaaagaaaaggaaaaaagaagacagcctaaagatccatgtgtagggaattggttaaattattgttcatctatataagagaatgtggtgcagctataacaaataatgaggaagctctttttttaaaaaaatttaaatttatttcctagggagctctttatgtaccaatataagacatactgataaatgaaaaaagaaatatgtggaacagggtacagtatgccatcatttgtgtcaaaagagagggagaaataagaatatgtacatagatgcttgtatggatataaaatatttttgaaggttactgaagataccattgataacctctgggaagctggtgtcgtgggttgggggagacttttcactgtataccctttttgaccttttgaatcttgaatcatgtttgtgtcagtgccctgttggagaggcaaaagagcatagtggttcaagagcaggggctatgtatccaacctagcagaagtcaaatcacaactcctctattatttagcaactttattaatctctctgggactcagttatctcatctataagatgggtgtaaaataggacctacctcatagggttgtacagatgaaatgagctcattcaagtaaagcacaatgctggtacagagaaagaactgcattattgctattactattcatttccattatgtatatataataacctatagatcagttatttaaggagattaacacaatcttaaatcacaacttttttttttttttgagacggagtctcgctctgttgcccaggctggagtgcagtggcgcaatctcagctcactgcaagttctgcgtcccggtttctggcaattttcctgcctcagcctcctgagtagctgggactacaggcgcctgccaccacgccyggctaattttttgtatttttagtagagatggggtttcaccatgttagccaggatggtctcgaactcctgacctcgtgatccgcccgcctcggcctcccaaagtgctgggattacaggcgtgagccacatgcctgtcctaagtcacaactttaaatcttaacttaaatcacaactttaaatcttaaatcacacacttagatcttaaactgacctataggcattattcagggacttgctactttggtgttaattatagttatcctgttttggatttttcagacactccagatgtcaacatatattatactctggatggcagcaaacctgaatttctaaagagaattggttatggggaaaataacacatttaagtatataaaacctattactctgcctgatggaaaaatacaagttaaagctattgctgtctctaagtaagttaagagcatggtgattaatttaatttatgatataataacattatgttctaattttattcattttttcctatcagaatcagtgctgcattagaaggacactactgaaacattattttaatttcagcatatgtatgtaacatttgtgttttacttgcctttcattgaggcataccgtaaggtgcagaaatcataagtatacagctcagtgaagtgttatgtatattaatactgtttttattttaaattccacattggggtttcaggaaggaagatcctttccagggccgggggtctctaaagagctccatcttgctctgaagaaaatactgtgttcgcggagtggctcttttattccccaggatgcagcctacaaccaccgccgtcattctcgatttcgttttgtatcgacttaattggccttcaaagctactgtcatttcaacttgttggacattagctaccatacttttttctttatccttttttttcttaatgactttttcccattttcaaatatagaaacactatttaatttggcaaccttcaccatgtgttgtaggcaaaaaacaaaacaaaacaaaaaaaaacctcaaatccttgcaattckgtgtggctgtgatataggaattatttttccagcaatgcaggtttggccacattttgggaacatttaaaagccccaaaccaaatgcagtacctggctggcccaggtactttaaaggactctagccccaccccccactgactgaattactgcatggctttttgaggagagctgcacattccacagcaaacatgattgccttggcatctgaaaattataacaaataaaatgaaacaaaacaacccctttatgcacattattattgttttaaagtgtgtgctgcaaatggagtatatgcacgttrttattctttataaaatgttgtcacacttgccaggccacttctatcaaggtaagtcatctcaattattaaaaattaagaacctcaatactctggtggccaaatgctgtaaagcaggcctccttagaagctgcaagtagtagtaaaatgaagaggcaatttaatgactgactatgcagtttgaaggagttaataaggctttcaagagagagtaaaaaataaggtcattctttatgcctctcaccattctgctctgtgtccactaagtgtctattcygaaaggtactgttagtatttcagatgtgctcagcttagggaaaatatttatttaaaaacgtttgagttttcaactcaaaaggtgaatgccttagctggttccccaaggaagggccagctggggtgggggaaacaacctggatcttagggggtagaataggtggatatgagccaggcctctactcatgtgacctcatgtggggttgtaagtgtgcgttctgggagcatcaagaccatccaagattcaggtgatccctggatggagaggcttgtgatgcctgggaagtgtgtgttaacaggaaggacaattggatcttgaatgacaggcctggggccaaaggtgaacatacagatgagatggatgctgaggcgaataagttaaggaagtggttcatctaaaagatcatctatatctgtaaccagatttatgaatctgtttaacattaaacaacatagaagttttaagctaactttcttgaagatggagaaaaaaattctaagaaatacacaattcatctaaatagccactacctatctgtgagtgacagtatttagaaataacatctcagctttctgtgatcagaagacacttgcatgttcactggctggagtgactcataggtggctaaatttccctgtttaaatctcttctttaaaaaaaacaacaaaaccagatttaaagattcataaatcttccgccctaagatccagggatacttatttgcttcaaggttcaaaaattttaagaaatataaaagttgagcatgtaagaaatctgagcagttgctgaagaaatgctaatgagccagacaatgtgtattaaagatcatatgaaaatcagtaagggcaaagcagacaaagaacactgaagaaagaagataattggaaatataaaaagtattaagagtctggccaggtcaaatagaaacactggctgcggtaacttttgagccataatcacatggaaaggacagcataggaaaggtgagctttcaatgcgtatgaggaggggtgagagttaaacacatcaaataaattcgccaagcgtggtcatgatgatgtggcagaggctgctggatgtcccccaatatctgtttttccctttaataatagggcccatgatttttagccaggcacatggttgcctagaagatatttcccaatccccgttgcagctagttagagatgtgtaccaggctgtggccagtggatacatgtagaagtgatgtgttcaactttaagattgtacctttaaagagaaagggtgggctttgcttccaattggctggaatgtagatgtggttggccagtcaggttgggccatgaggataaacgcaatgtcatagaaatgatggagtaaccaagtagaaacttgctatcgtgcttctgtcaccatgacacccctatacctagctctagactgcttataccctattacttctgtcttgtttaagcctctgtttgtttgtttgtttgttcatttgttttttgagacagggtctcgctgtgtcacccagactggagtgtagtggtgtgatcttgggtcactgcaacctccgcctcgtgggttcaagcaattctygtgcctcagcctcctgagtagctgggattacaggtgtgcaccaccacaacccagctaattttttgtacttttggtagagatggggttttgctatgttggccaggctggtcgtgaactcctggcctcaagtgattcgcctgccttggcctcccaaagtgctgggattacaggagtgagccaccgtgccctgccataaagccactattgttttgattctgtgttacaacgaacaagcctatatcttgatagacaagggacaagtatcaagcaaatacctacagagaacatgatcaagagtacaggtcatcaacaaggctgacaatatgaagtgtcagcaagtatgtggagaagctggacccctcagctactgctggtgggaatgtaaaatggaacagccacagtttggcagtttctgaaaattaaacacatacctgccatatgacccaacaattccactcctcagtatctattgaagagaaatgaaaacgtgtccacataaagacttatacatgaatgttcatagcagcattatacataatagcccaaacccagaaataatccaaatgaccatcagctggggaatggacataaaaattgtggtatatccataaaatggaatactactcaacaataacaatgaacgagttacaacaacatagatgagtctccaaaaaaaacaaataaataaaaaatccagacacgtaagatgaccacatatgtataattacatttatgttaaatttctagaaaagacaaaactatagagataggaaacagatcagtggttgcctaggagrttggataggagtgactgcacacaggcacaagggaattcttttgggtgatggaaatgtcctaaatatttccactgtggtgatactcacaaaattgtgtacattacattgactgaattccgttgaaccagaaacttaaaatagatgaattttatgtcatgtaaattatacctcaataaagctgttaaaaaatagagtataggtgagctactggtagtgaaataacatcaccactagtttttagtcatgggcacggctacattgtcttcttatgaagctcttactgcatcagagaacaagatgaattgtgaaatattatgaatgaatggaaaacatgatagtatttgagttacagaatctaccagagcagcatatattacactgtctacagctgagacagggaaaatgctcttgattcatgtggaatgacctaggcaacacattttttgttttagaatagtttgaggcttatggtctgatatctttatgatgaatgtggtagatagtcttcaaaaatggcccccaatgaactatgcctcccagaatttatgcccttttgtaacctttctgctggtgttgtgacttgcttttgaccaatagaatgtttcagaaatgatgccaagggcttctgagatcacaagaagtattgtagtttctgctttggtttcttgggacaaaaacactggcaggggrttggggtagtcaggtactatggaggaagtctgactacctgaggcttccatactgtgaggaagcccaagctaaccacatgagagagagagggagggacagagggatggagattgagtgagagtgatgagtggcgagcccctagctgttccagttaccccagcccaggctttgcatatttgagagaagtcattttgaacatccagcccagttgagccttcagttgactccagcccttgctgatgtttgatggcagccacatggaagagctcaaatgagacctacccagtggggaccgtgaatccacagattcatgttttaaggcactacctttggggtggtttgttacatagcagtaaatagcccaaaaggaaggaggtcaggaaagactatagaaattacatttgatttcttcaatttgaaatacaataaatttagtagctagactaaggcactttaataaaatcatcttgttagccactttttaaaaaatctttgtgtaacacagactttttcctttcttaataataattttcagagactgcagacagagtggcattgtgacaaaggtgtttcacgtagactatgaaccaccaaatatagtctctcctgaagacaatgttgaaaatgttctcaaagattcttcaaggcaggcaagtaatgaaactataatccattcagattgtcactgtattttggttccttctttctcagtgagcagatcttgccttttattaccttacytctgctcacagtcaggtccttataactgaagtcattatcaaccattgcaaagcatctttactgatttctcagccttttgtcagtctcctatccaccctgaagatgagagttcctgctgagcattggggtccatgctccagtgtcttcagtggctctctcttacctactgaaaaaaccagaaacctttagccttccatccaagtcatcagtttctgcccttggtcagcttttcctggtctgtcaaccccctacatatactccaaccaaactggagtgtgtttgctatgccctatcactgctatcctggcacccaggccttcttttataaactgctttgagcatgtgattactttgttccttgtttatcttgcctatgcattataagctccaaggtggcatggttgccatactcattgccttgcacaggagcaggcaggagagggtggtgagtgtgtatttgctgaatagatgcattaagtagaagtcctcagtgggcatagaattcttttatgttgaaatctttattcccaaatatctgcaaagcctccccactgtgaagagtcaattagatccatctgagaaggatgtgtgacgcttcaggcactgggtgtgagcatcrataagaaagattcaaggagttaggccagaggatgggctagcctacagtaaggcggccaacccagaggtcttggtcacagggatgttgttgggattgacagaggaagtttataggggtttcacttaagcttgaccatgaacctgatrctagagaggaggttggtagatgcaggcatgggtgggactcaagtgtgatcaaggcaaggatctacactgggcaggggccgccttcgggggctaagccaacatatgtcagcaagtgcttaggcttgaatcaggtgtgagggaccaagtccatggagaaagtccagagagaagagtgtttaaggactgtgtgtgggcaggtggtgtgcagaagtctgattttggtctgactctaccctgcctttgccctctggacttggtggtccctctgttgttacccagactcccacagttgtaacatcctgcctgcatgtgctgctccctgcctcctgccttggccacttcacctggtgagggctacatccagatgtgctgccagctgagcagcccagtccagatacaaagctgcatgtttccagaataaagtgaaacaggggtcactttgtacaaatgaccataaactctttcaaataagaaatgcacaccatgacactttctctatcatgcagctttaattctcacatgggaataaccaagtgattgatatgcaatctcttcattcctaggaattcaaaaatggatttgttggatcaaaactaaagaaaaaatataagaactctgaaaatcaacgcagctggaatgttaaccttagaaagtttccaggtatgatgtgacagaacaaagacaaggttttgtattctgaacccaccgaagaggttcatggcatgttcgttgcatgttttcttgtctggagaagtgttggaataagaaacactggggcaggaaagtatgctgtactttgaattttaatgacgtccttgctwacagcttaagatcatgaaggaggatcaagcagtccaaccaagttagatttcttgacccacygccgggagccatgggggcatctaaccaaacagaggaaatgctggagttgtagggtttgggggaagggtggagtttgggtgaaatataaatgaaagcagagttttgatagtctcaaagcgaagctggtctgggtgtgaagggatcagcatcaggtatggacccagggtatcagcatcaggaaggggacccagggttctgttgccttggaaactacaaagatacatggggaacactgtgttcagaaatgattatctctgcaccagggttggacattgaagctgcttctctatgtcaragtggcctagattccccaggcaagagttgaatgtttygttcttactgagaatttcaaacagcaaagtttctgataatctgtgatttaagagaacagggtttctcagtgagtaagaaagacaaggcatgcaaagagggggctgctaacgacatttacagctgcagtgtgctcttgggagatataatatttcctgctaactttgcaactggattgatctgtctgttttcccagcctgaagtggaatattgtagaatgcagcggggaagatgatcttctcagtctgggcttgttttttctttctcacttctaatgcattgagtgtgtggcgggagctctttatataattgttacttctagggaagcaatgtggtgacagtggttctttattaaaaggtctcccgctgtgaagatatctttgtatgattatgtataattacagatgctcaaagaataatgtttttaatatcattgtagacgtccaggtaggtgaaagaactgaccctaaaactttgaaagatcttcrcttttcagagagtccattggaaatcccagcttatggtggaggatcaggttctagaccacccacccgccagtcccaggtaacttctaaggacaatctttagggtattcaaatacctcctatatttttaatgctcccatgaaatactttaagactgcacctcccccacttttgaccatgtgccaggcactgttctagtgctgggaatactgtactggacaagaaaagtccctgtattcatggagcttaccttttattgggcttgggggcagacacataattttaagtaaataaacagaaaatttaaaatggtggtaagcgtcatgaagaagataacatggtaatgagatagagcagtggttctcagaggcgatccccagacctgcagcatcagcatcacgtgggaacttayttgaaacacacattctcaggcctgatgagcaaggtgggagatgagtgagaaggtggctggggccagagtatctagagctgtggttctcaatcatggctgcacgttagaatcacctgaagagcttcaaaccaatccccaaggtttagcgtcagaaattctgatttaattggtctgatgtggggtttgagcatcgttaaaaaaaaaaaaaaccacccctaaatgattctaacggtcwggtatggttgagagtcacagatactagtctgaccgtaagaagtttgaattctattctaattgtaaatggtatctgtttggcaggcaagacacagtcccatttacatttaaaagttttctgtttggccacagtatggagattagaccatggaagaggaaagggagaacattatttaggaggcttttgttccaggtgagaaatgatggtgacttggaccaaggttgtagaggtggtcaggataggaggcgggctttgctgagggatccgacggatgagagggaaggggaggagccaagtctgcctctcagggtttgtcctgagtatctggagatgatggtgccattgacaaagctggaaaagatgagagacgagcaggtgtccaagggcacattagacatccaagtggaggtgttgagtagattgttggatgtgcaagttcacatatgggagaggtcagagctggacatatgtacttagaaatatggaaatattcaatatgttgatggtatttgaagcttaggtctgaacgagatcactagtcaaggctgaacagaaagtgaagagaaggaaaatgaagaaagtcctcaacttagaggttgagcaggggaggaggagcctgaaagtagaaagaaagccaaaagaatatgttgccatggaaaccaagagatgaaagaatttcaaggagaagatcatctatgtcatatgttactgaaggttctaattagataaagacagacaattggaaattcacattggctttgacaagatagaggtgacttatgaccttaataaaaggcatattggctgggcgtggtggctcacgcctgtaatcccaacacactgggaggctgaggcaggcagatcatgaggtcaggagttcgagaccagcctggccaatatggtgaaaccccgtctctactgaaaatacaaaaattagccaggcatagtggcgcgcacctgtagtcccagctactcgggaggctgaggcagaagaatcgcttgaactggggaggcggaggttgcagtgagccaagattgtgtcattgcactctagccttggcaacaacgtgagactctatctcaaaaatgaaaataaaaataaaaataaaaggcatatcagtgcattcttactactataacacaagaaagatgctcttacactagttgcctactatactattatagtgctttggtttttcaatgtttataaaatccaatttggacttttggcatctaagggcaacccaggagcccttgttctgttcctcctatttgagtcccaagtttaatgtacctggagtcacattttctgtgtaaccacagctccttgtgtgcccatgattgcatggctgctcacacttaccatcaagtataaaggagaaaagcatggtttccaaacccagttgcatatcagaatcacccagggactgaaggctcagtgttgctacatccaatgaatttgcatgagaaggcagaaamctacatctttatgtgtaataacataatttaaagttttgactgttagttaaaattttgaaacactatgggagccaatgccaaataaaactcaatggcaggccagatttgcctaatagaccaccactttgagacttctggtctaggtcatgttatgtttttatttatttgtttttctttttgtagagatggggattcactatgttgcccagactatttttgaactcctggcctcaagcaatcctcctgcctcagcctcccaaagtattggggttacaaatgtgagccactacacccagcctaggccatgttagatgtggcacaaaagcaatgagaaacctctgactgctctctattgcctgcaggatagagcctgtagtcctaagttcagacctttgagtttcctagagatacagtttttgagaaaaatagatactgaagtttgtttgtttgtttgtttatttatttatttatttatttatttatttatttgagacggagtttcactctattgcccaggctggagtgcagtggcatgatcttgactcaccacaacctctgcttcccgggttcaagcgattctcctgcctcagcctcctgagtagctgggattataggcatgcgccaccacaccctgctaattttgtatttttagtagagacggggtttctccatgttggtcaggctggtctcgaactcccgacctcaggtgatctgctcacctctgcctcccaaggtgctgggattgtaggcatgagccactgtgcccagccgagtttatttatttatttttactttttttttttttttttttgagacagagtctcactctcacccaggctggagtgcagtggtgcaatcttggctcaccacaacttccacctcctgggttcaagcgattctcctgcttcagcctcccgagtagctgggattacaggcacccgccaccacacccagctaatttttttttgtatttttagtagagatggggcttcgccatgttggccaggctgggatactaaagtttttaaatcctaaaatctggtctgtctcatggtaaattcaggtatcttttattgtaaactctcatttttaatgaaatatagatatatgattgtgaatagcactttaaataatttagaaatgttagatactagagtaataattacattactcataatgattttttatttttataattttttatttttatgggttcagggggtgcagatttgttacatgtattgtataatggtgaggtttgggcttctagggtacccttcacccaaatagtgaacactgcacccaataggtaatttttcagccctcgccttttcccacccttcccacttttagagtctatagtgtctattattcctctttatatgtctatgtgtattcacccataatgatttttaatggaattttactataccatagcctttaccatgttattttgactatatgactctgtctttatacctatattcttaattttagtcccccggttttgcacacgtaagcggtcagaagtgtttgacaagcacggagataatgagaattcaaagggagacagactttctcaagtaagtatcacattctctttactctgccttaaatcctacaaagatacatcatggtcaaagagaatttaaagatacgacatttttgcccacctccaacttttttttttttttttttttgagacggagtctcactctgtcaccctggctggagtgcggtggtgcagttttggctcactgcaacctccgcctcctgggttcaagcgattctcctgcctcagcctcccgagtagctgagattacaggcacgcgccaccacgcccagctaatttttgtgtttttagtagagacggggttttaccatgttggccaggatggtcttgatctcttgacctcgtgatctgcccacctcggtctcccaaagtgctgagattacaggtgtgagccaccacacccggccccaactttttaaattaaatgtttacagcctgttaaaaagtataattgacatacaataactgcatatgtatttagagttcatttgactatgtatgtatgtatgtatgtaaccatgacactgtcacaatcaagaaaatgagtaagttcatccctgccaaaaatttcctacattgtaccctatttggtaaccccttccttttacccccgctcatcacaggcaattattgatttctttcttgtcactatagtttaacttgcatgtgattcaatatgtcaacgaagtgacttagtgtgtgctctttaatgctggacttctttcactcagcgtaactattttcagattcatctatgttgttccttgtaacaaacatccgtttctttttattgttgaactacagtccattgtatggatataccacagtttgtttatccattcacttattgatgggaatttgtgttatatccaattttgggctattacagataaagttgctgtgaacatttgtacaaaagttactgtatatacaaaagtgatccagtctcatatctggtctctaaataaataaataaattgataaaaattaacagatacaataaaataatttttaaaaccccaaagtcattatgtatacacgttttcatttcccttggggcaaataccttgaagaggaatatgataggtatatatttttttaagaaactgccaatctgctttccaaagtgattgttccattttacattctcaccagcagtggaggagaattctctgtatccttactaacttttatttttattttgatcattctaatgagattgtaacagtatctcattgtggtttttatttgcgtttccctagtgactaatgatgttgagcctcttttcatgtgcttatttccatccatgcatcttctttggtaaagtgtcctttcaaacttttggcctttaaaaaaatgcattatagtccgggtgcagtggctcacacctgtaatcacagcactttgggaggctgaggtgggcggatcacctgaggtcaggagttcaagaccagcctggccaacatggtgaaaccccatctctactaaaaatacaaaaaattagctgtgcgtggtggtgggcgcctgtaatcccagctacttgggatctccagctgaggcaggagaatcgcttgaacccgggaggcggaggttgcagtgagccaagattgtgccactgcactccagcctggatgacagaggcatgcgccactatgcccggctaatttttgtatttttttaagtagagatgaggtttcaccatgttggccaggctagtctagaacttctgacctcaggtgatctgcycccctcaacctcccaaagtagtgggattataggcgtgagccaccacacccagccaagttgaggaaatttttacctgtttccaatttgctgagagcttcttttttaaaatcaggaatagatgttggattttgtccaaagcattttttctatttattgagaggataatttagtttttctttttctgttcatgtggtgaattacaatgattggttttcaaatgttaagtcaaccttacatccctgaaatatatctacctgaagtgttatctattttatataatgttgaatttgatttgctaaaaggttttaaagaattttttttgccagcatttgcataagggatgttgggggattttcttttcttgttaatgtctttgtctggttttagtatcggtataattctagattcatagaataagttaggaagtgttttcactccttcaccttctgaaaaagtttatgtaaaattggtgttatttcttccttacatatttggtagaaattcacaagtgaaatgattagatctggagttttccttcaggaagattttttttcaggaagatttttaactacacattagatttctttaatagatataagtacatttatatttattaatctttcttttggagtacattttaggtttaatttgttctttttttagtttctttaatgggaatatgaagttactgatttgaagtctttcttcttttctagcataggcatttagaactatacatttcccctgaatactgttttacttgcagtctctgaattttgatatgttgtgttttcatcttcattcagttcaaacagtttctaattatccttgttattttgtagggagggcaatgggttagttagaagtgttttattatatttccaaatactggaggattttccttgtatcttttgggcctgtctgccttctttctttccttcctgccttcccaccctctctcccttccttctttccttccttcctttcgtcctttcttctttctttcttagggtctcactctgtcacccaggccgaagcgcagaggcccaatcatagctcacagcagcctcaaactcctggattcaaggcatcctcctgcctcagcctcctaagtagctgggactataggcatgtgccagtacacccagctaattaaaaaactttttttcttttttttttttttggctgggcgtggtggcccatgcctataatgccagcactttgggaagctgaggtgggaggatcacttgaggccaggagtttgagactagcctggccaacatggcaaaaccccgtctctgctaaaaatatacataccaaaaaaaaattaggcatggtggcacatgcctgtcaatcccagctactcgggaggctgaggcacaataatcacttgaagccaggaggtggaggctgcagtgagccgagatcatgccacttcacttcagcctgtgcracagaggaagactctgtctcaaaacaaaaaaccttgtatatatatatttttttgtggcaggggtggggttttcacaaagttgcccaggctggtcttgaactcctggcctcaagtgatcctcccaccttagtctcccaaattgttgggattataggtatgagccagtacacgtggcctggtgcttatgtcaaatttatttacttttggtcagaaaagatatatgatttgattggtaaatgttctatgtacactttaaaagaatgtgtattctgccagaatgagtgtactataaatatcaattaggtttagttagttgatggtattgtttaagtcttctctatctttactgattttctgtttatcatgtaatcagttattgaaaaagcagtattgaaatatatgactgtaattatgaatttgcctatttattcttgcatttcatttctatcagtttttcttcatgtactttgatactctgctattaagtacataaacattttggatttttttgtcctcttgctaagttgacccttttatcattatgaaataaacttctttaactctgttaatattctttgctcagaaacctacttgttctgatgttaatgttgtcactcctgctttcttttgatgtgtgtgtacctccctttattgaatctatttatgtctctatttaaagttggtttctggccgggcgcggtggytcacgcctgtaatcccagcactttgggaggccgaggtgggcsgatcacgaggtcaggagatcgagatcatcttggctaacacagtgaaaccccatctctactaaaaytacaaaaaaaaaaaaattagccgggcttggtggcaggyacctgtagtcccagctaccctggaggctgaggcaggagaatggcatggacccgggaggtggagcttgcagtgagtccagatcatgccactgcactccaatctgggcgacagagcaagactccgtctctaaataaataaataaataaacaaacaaatataaagttggtttcttttgagcagcatatagttaggcctagctttttaaaaaaaaccatacctgacaactcctrtgttctaattggagtatttagagtatatatagagtattctaactgatacctcggtaaatatgaattttttccactttggctggtgtaagcatgagctttgcagccctgtgtgaatcctgaagactgttttctctgttaccctttggtgtttactttctaaccttgagtggtttcttccatcacatgcactcatcagtagtacccaggtgaagacttgagggtgaccctctgcaaaattctgaaactctccctgcagctcttctctggtattctttcctgaaagctccagttaccttgaccttctgagactcccagctctatgtcttcaattcaaatcagtggaatgagatagtcagattacacttcatgagctttaagcatagaaaagagggaactgttgttgctctgkcgggtgggcccatgccagagagatggtgaaaccttggtgccatggtacagtaatgaaggactaaataggataagagtgtgggaatgagctcagctccaacgtggagactagtgtgggcaacgagrcaatccggtgcacagtatccaagccttctagttgctgaggagctgttcagatcaataggtcacaggatcaggagccaacttgtctggaaaggcatggcagtagcaggaaaggaattagggcagcctaattccaagaatgctctcactttggcagatagccagaacccatttagatgagtgggagctaaacgatgggtccagctgcataagaaatggggccagatgctgctggggcagggcctgaggactctaagcaaaggtgggcaaagagaaaggatgggtttgaggcacaggcaagaagccctgtccctcagactgggctcaatggtagaaagtcagaaaagcataatgtaaaaattgctggaattcccagggctcaccctcatacacatcaaatccaatgtgacaggacaagccagagcccgagcaagaagtggggccaaggctgctgataaacttcttgccatgatcaagaagttatatggacttggcctacgcagaaagggcaccagagggtccagttgcaaggccactattccaataaaatgaccaaatgacctagataagtatttcctgtcttgaacttgttccatagccattgagagcagtctgcttttgttttgtgtttaaaactgtttgaccgcttttagatttttatcagtcttcttaatgtgggcccaccagaacatggccaatcgggaacctgttttgttgtaggtgtgcccactgccttgccccccggccatcagatccctttgctcgcttctgtcaagaatgtggctctcctgtcccacccatatttggctgtcgtctcccacccccagaaggagctcaggtgagcagcagaattcktaaaaacatctttcattsgttgatctgatctttatttgcagcagtaacacagtgcttggtacacatgaactgcacatataaatacttgttgaagaattactggctgattgaactcttacacactcctacttaagcatggaaaaacttacttgcaatgctgtgtcttttgtgtggcctgccagaagcacgggcttaaaaaagattggaatcttattgttttaatgaggcatgcatggataaataaatgtttcctactcatttgatagctctgctcatatcctgggtataataaggaaatatattctagaaataaataaagagaactaccaattactttatgtctctatatatctatatatccataagatgcatcattctgtccaaagaatctatagattgatctgtatatttaaatttaaaagctttggctgatttaggatagataataattgatatctcactactaattttgtagatagttaaaaaacatacttggcttgctaaaaattaaaaccttcaccaaaatgtgttcatcttttaagcacttgatattttggggattttttttggacttggaataaagggatgaaaatgaaataaagggatctgtgatattgagtgaaaaattacaatttttaagaagatagttactaagaaaaagtcactaattgagtgagttccaagtccagagttttagattcgagttatgcctcaagcaaggggtcaggtattaaatggctgttttaatatttttctaatatattgctcaatatttttgtagaagttaatttaatttacttcagtgatrcattttaaactccttaaagattttgctaatatataatggcagaatcttagggaataagggtgggagtcgattttaaataaaaacagactataacaccaaattgggccaaattcattgatatgtttgcagcttrtagagattctggactaaatgtgttagtgaaagaagacgatacagaaaacaaaatatgaacaagtcccattggttgatttttctctgtttatactagttggtgcgataccaaaattattttctacttgcctggaaagggattttcacaactaacttcatttttacagggaggaaaggttatcagtgattataaatatttaacattatgaactttaaaacacctagattgccccccagttatatttctattagtgcaacaatagactataatgtataacagctttgtaatttaagctaacaaccatttattgagtactactgtgtcctgctctgagctgggcttctaggagtcaaaggggcaggatcctacttagacccacgactcagagagtctcagtaaagagatgcagaggtgtgtgctctcctgtctctttgctcttgccatgtgagctaacctgtaggacacccagttgtgctgaaccctgtgaatttcagtgttgtcccatggacgcttctcagttccactggcaccccagccagcttcccagatagtctttggggcatcccagtagcaactttccagcaagttccagccacatctctgtatctgacttcccaacatgttctgccagttccctagatgaggaattcctaatgagtttcattggatcccagtgggcggctttttccttgctggctctgatctgtgtcacctcagtgaacttctctgccatccggtgggtgacaaccacactcaattcaatgaagtctgatttcagccttggatgtggggcaaagtaagtgcctcttccaaatttgatcctccttcggttctctgtctcagccacagaggtaggggatcctccctatgtttggaatttctgtatatgtagaatctgctttacccattagtagttaatccctggataccagttaataactatttatatgaacttttcctgttcaaattagttgtggtttctatgtcctgattggactctgactgatacagaattggtagtgggattggtcccaggaaataaacygggaaatgggattttggaagtggtttggtcttgtcctttgcttgggaacagtgccgagctccttgccaatgggaaatgggacactggtgatccatagcatgagggggcatcacagttaatcaggctgtcacctgtggctgattrtgatgacgtgccaattgaagcaagtatcttgaatggccaagtaactgctgcacttgactctatgrcagtgacaatgactacaaaaactgtggtggaggatgtattctcctgagtccatgggagcattcacagaaagaaaacgacaagctcaggacctttaagtcatggtgcaggaaccagagggctcctatgacagcccaaaataatatacttcttgtagctccagggttatattgatgaaaatcaaacaaaaattgtattgtatatgttggggacttataatgtctgttaaattcacctgatcaccagatttcttatttgaaagttaggccattaattgagaaaggatgggaccctgaaactcagatagagatggcaggtgggacccagatgaaactgacagtcttgttacccttgtcactctgtgcctcctgcccaatggatgtagtttgcccttatgtctgaggatgcccttctgtctgaggataccagccttcrttttcttgaaatgtttgtgataacctcacctgggcagatggcttgaaaggggatgtttattctcctcacagggggttgtgggtggtttaaacccatcacaaccacctgttgcattctagggacccaacccagcatgctacaggaggacaggtgcatgctgtgatccaggaggaaataacttacacacacaaagaagaggaagattttactaatatatagtgacagagtcttggggaataagtgtgggattagattttaaatgaagacaatatgacttgaaattggtataaattcattgatatgtgcacaccttatagagattctgggtttaatgtgttagataatgcagctgcggtggctataacagcttgcttggttgactgcttaaagcttggcctcagtagtggcctgtgtttaatgagattgggatagcagaagtttcccaggtatatcagtttgctaaggttgccacagcaaaaccccacagaytgtgtggcttaaagaacagaaatttattttctcatagttctgcaggctggaagtttaagatcaaggcgccagcaggtttggtttctggtgaggcttctctcctcagctttcagacggctgccttcctgatgtgtccttacttggcctttcctctgggtacacaaccctggtgtctcttcctcttcttataaagacatcagtcatattggatcaaagtcccactgtaatgacctcatttaaccttaattacctccttaaaggacctatctccaaatacaatcacattgggggctggggcttcaatataatgaattctggggggcacagtttagtccctaacacccagcatcatgtggagcagggaatacagagacttaggcaaataggaaagttggagtggggttgatacctgtgtcctgcatccctaactcttacctatgtttcacaagaaggcccagaagacacttccatcactaagatatcaaggaatacattagtgagaggagcagctgcatccttaaaaagttctgtggctgctttcctttgtaggccagatatgatcgtgggggatgctgctatttagaggagttccctgatctcattagagctagtgagatcccagagtagcagaagttaagtggcagcacttaactgccaaagacaaggacagtaatgatgtttcagtaagaggaatctgacatggcattcctaggaatgatagacgggcagccttctagtgtatcgcctggtctatataattgaaaaatgctaggtcatgtagctaaaaactgacttgaatcactgcattggagcaaccaagttcctcccccagtttccagacataaatcagttcacaaattcagtctcttgatttaaggggagactggatctccttagggaaggaccctggagctttgcaagtacatatcataagtcttccttgaacgcttccccaaggggacttgttgctttcaattgagtgactgtgcagtggggaaaaggaaatgcccaaatctttgagggatttctagatactggctctaaattcatgctaattcttagagattcagaacaccactgtggtcccccagtaaagctgggactttaggtgcgcaggtgatagatggaaccttaacctcaactctgacttgtagtttttgcttcatgtattttgggggtttgctgttatgtccatgctatggattgaatctttgtgtcttggccaaaattcgtatgttgaaatcccaacccccaaggtgatggtgttagaaggttgggtctttgggaggtaattaggtcgtgatgatgaaccccttatgaatgggattagtgcccttataagagaggctcaaaggagcttgtttgccttccaccatatgaagacacagaaggtaccatctgtgaagcagagggcaagccctcacctgatactgaattcgctggcatcctgatcttggacttctcaggctccaaaactctgagaaataaatttgtgttgtttacaagccacccactttatggtgttttgttatcacagcctgaacagactaatacagtcatatacacttataattgttctatcttcctgactattgaccttcttatcatccccaaatgtctctctttgtctatgctaatatttcttaaagtcctttattctctgatatttatgtagctactctagctcttttatggttactgtttgcattgtaaggccttttctgtgcttttactttcaatctatttgtgtctttgaatttaaggtgtgtttctagtagacagcatgtagttggatcttgcttttttatccattctgaataaccttgccttttgaatgtgatatttagtcaattcctatttaatgtcattattgatgtggttaaatttacatatgccattttgctatttgctatttgtatcatggcttttttgttactttttccctcgtttactgctttcttttgtgttatttcttttttttttttttttttttttgagacagagtctcactctgtcacccaggctggagtgcagtgacatgatctcagctcactgcaagctccgcctcccaggttcacgccattctcctgcctcagcctcccgagtagctgggactagaagcacctgccaccatgcctggccaatttttttgtatttttagtagagacggggtttcaccatgttagccaggatggtctcgatctcctgacctcatgatccgcccgcctcggcctcccaaagtgctgggattacaggcgtgagccaccgcacccggccttttgtgttatttcttttgtgttacttttagtgtgccattttaatgcttctgttgacttttttattatttttaaagttatcttaagctctagagattacaatatggacctcaatttatcacattctattttatttaattttgatttttaatttttgtggatacatagttggtgtatatatttatgggtacatgagatgttttgatacaggcatgtaatatataataaccacatcatggaagatggggtrtatcacagtccattttagagtaatttaactcaattctactgaaatatagaaatttcactcctttcctctttctttttcttttcttttcttttttttcttttctttgagacagagtctccctctgtcatccaggctggagtgagcgcagtggcacaatctcggctcactgcaacctctgcctcctgggttcaagtgattctcctgtcttagcctcctgagttgctgggattacaggtgtgcaccaccatgcccagctaatttttgtatttttcatagagatagggcttcaccatattggccaggctggtcttgaactcctgacctcaagtgatccgcctgccttggcctcccaaagtgctggaattacaagtgtgagccatcgcacccggcccctttctttctttttcttaacattgcttaagtatcgtcctcctttctttatcttttatgtaataaccataaatattgcttctatatatgttataaactgaaaaatgcggtgttatacaatcttatgtcatttaaagaagatgagataaaagttctatggagtcatttrtatctgccctcatatttattatatctggtcttctcacttcctcctgtgaactcaagtgatcatctagtgtcatttcctttcagcctgaagaacttccttcagtttttcttgtaaggcatgcctgatagccatttctctctgtctttgtgtacgtcagaatgtttattttgccttcatttttgaaggatggtttgctgcagatgtaattctggtttagcaattattttctctttcagctctttgaatttgtcattctactgccttytgccctccattgtttttgatgcgtggttttttctcttgctactttcagtattttctctttgtctttgaccttcaacagtctgattataatgtgtttaagtgtgggtctctttgtgtttgtctttcttgggattgactgagcttattggatgtgctgagtattggttttcctccagtgtgggaaataytggccattgtttcttccattctttttctgttcctttctctctttcccttacttgttgctgtgcttgattttgccccatacgtttttgatgttctgcttattttcttcagtcttttttctctgttcttcagattagataatttctgttgagctatttgttcaagttcactgattctttcttctgttatgcgatctgctgttgagtcgctctggtgattttttttttttttttttgagatggagtctcgctctgtcccccaggctggagtgcagtggtaygatctcggctcactgcaagctccgcctcccgggttcacgccattctcctgcctcagcctcccaagtagctgggactacaggcgcccgcctctggcgatttttagaatttcagttactttacttttcaactccaggctttgactgaattctttttttaaaaaaataatttctgtctctctattgtgcttccctaccagtcagatcattgtcatcatactttaatttttatcaaatgtggtttcctttagttctttgaacattttttaaaaatagctgctttgaaatctttgtctactaaatccagcatgtaaaggcactcagagataatttctgtggactattgactatttttcctctgagtgtaggtcactttattttttgcatgtctcataagttttttcttgactgcgtcaggtagtatattctagcaactctggattctgacttttttccccgagggttgttgttttgtgttttgtttacttggattaaatctttaatgtctgcctcccctgcaaggcatggccactagtgtcaggctttttattttttttaaattttttttcttaattagagaagtaaagaaacaaaagaatggttactccatagacagagaagcagctttttttttttttaattatacttttaagttctgggatacatgtgcagaacatgcaggtttgttacataggtgtacatgtgccatggtggtttgctgcaccyatcaacccatcatctaggttttaagccccacatgcattaggtatttgtcctaatgcttttcctcctcttgccccccacccccgacagaccccggtgtgtgatgttcctctccctgtgtccatgtgttctcattgttcaactcccacttatgagtgaaaacatgcagtgtttggttttctgttcctgtgttagtttgctgagaacgatggcttccagcttcatccatgtccctgcaaaggacatgaactcgttcttttttgtggctgcacagtattccatggtgcatatgtgccacattttctttatccagtctatcattgatgggcatttgggttggttccaagactttgctgtcgtaaatagtagagcagcagcttttcctttctcttatatttaagcctgatgtttacctttgggtcagcatatcttagtgttcagttggccagagattgtacacaggcagctccatccaggaaagcctccactccctgctgatggatctgtgtgttggctgggtaacattgaaactcaaggctgttttccagccccagcttttactctatgccgagctctcttgcagttctctatgtgtagttcccatcagccagggckgtgtgggtggcttgggcctactctggtttatgttgcttatgtgcatagcctcctgtcaactaaggctatgtggagagctatcaagcccctatcattgaattacctcctggaactccatgttaaatccttggccagtttgccagtcagtgcatcgattaccccaaacaggctcattatctcagactaggggaccactggtcttccttgtttgcttgccaccaaaatcgtcaccttaacagtgctctaaatcaagtgatccttgcccatcagcagccacaaaacttctggttttcacagcctgccctgccctggtggaactaccacactgacagagttagagaaggagggggcagcccaggcaacaaccacccagagcttagtgttcttttctgcagttcagtcatttttaggaacttctgtttgttatctgcctttcaatgacttcagggtgctgaagtggttgctttttgacagcagtatctgactgtgtgattccttttttttttttttttttttttgagcaggagtctcgctcttgtcacccaggctggagtgcagtgaggcgatctcggctcactacaacctctgcctcctggcttcaagtgattctcttgcctcagcctcccaagtagctgggattataggcgcccgccactacgcccagctaatttttgtatttttagtagagctggggtttcactatgttgaccaggctggtctcaaactcctgaccttagatgatccacccacctcggcctcccaaagtgttggggttacaggcatgagccaccgcacccagcctgtgattcatttttggggaagaggatttatagacctcctcattccatcatgctacaatttcctatggatatttttctttttttttttaacatctctcttttctacaatgaacatgtttttactcttaataggaataaaataataaawgtaattggtattttattttctattatttactttttaattgacacatagtaattgtacatatttatggggtacatagtgttatttgatacaaataatgtgtagtggtcaaatcagagtaattagcatatccatcataaaggtaattatttaaaaaattgttttacaaaaacaaatcaaactttacattcttccaccaagtactaaccaagcccgacctgcctaggttttgagatcagatgagatcgggaatgttcagggtggtacggctgtagaccaaaccttacattctaagatctattcataccttcagtttttatgtgcaagataaacyagaccttttccttgtgcagatgggcttgtgtgcagaatgcagaagcttggtacccatgaacactcccatctgygtggtgtgtgaggcccctcttgctctacagctgcagccacaggcaagcctccacttgaaggtaatgaaatgtgattctgtaaaaacatgaatgaaatacatagtaatgtttgaacaggtatatgtcctttttcagctagtgggatggggtaacaatttttttttttttttgagacagaatcttgttctgtcacacaggctggagtgcagtagcgcaatctcagctcactgcaacctccgcctcctcagttcaagtgattctcctgcctcagcctcctgagtagctggaactacaggcgtgcaccaccacgcatggctaatttttatatttttagtagacatggggtttcatcatcttggccaggctggtctcaaactcctgacctcaggtgatgcgcccacctcagcctcccaaagtgctggattacaggcataagccaccatgcccgccaggatggsgtaacaattgataagctaatatacatgaacaaaatccattctatttttagtaaggtatgctgtccaagagtttaatttgccaataggatctataatattaagagagatatgtaggattgtattccctgaacatggatttggagggcaaattgcactacagctaacaaagacaattttttacttcatatatttaaactccaacattgcagttagtgttgatttataattttgtccttaaagtggctcatacttttgtttgccttatttgattataggttcttgttatggagaaaaagaatgactagaactagtcacatggaagaaaaagttatgtatcatcacttacatccaaaaaactttgctcaaaaaatgatatcatactgtgaacatttttttgatagaatctttaaacatacaactaaatattttctccattcttcaatttacagtcccatttacttcctctttaatcccaagtaaaggtcactagaggataaaatagatttaatagagggaatttgggggattaaaaaactaagaatttttagcaataagggaaatgcatggcattatgtacaggccataacactcctaaaatggccttgtgggttgtatatgggcaaaatgtattcagagaaaagataaatccactttttctttcaccttcaagctccctttagcatgaagagttcacaagtgtacaaggctgtgtgagccttcagaaatgagattttgaataactggccaggccaaagtcaggtagaggaaaatttactaatctttttgttcaatgactattttcaatcttaagatgcttaaaaagccactgcaggaagccactatacagtcctggaagtctttctccagacttcttatatatgggagagagaaatctatttttctcttatttargcctgtgttattttgggtgttctgtcaagcacagcaaatctattcttattaatacatttattcaggatgtttgaagataatatcactgcaaactctttggactattcagaacaggaagaataggggtaagtgttagttgtgacccaaactcaatatatataatatcatcttcagtatttgaaatctagagttcttcccattttatgggaaggcagagagacacaaaggtacatgtaagtaatttttcccttcaatttgttgtaaatcctatattgagaataaacacaggacttctacagtgataagcagcattaaatccaggaatggcctctttcttgcagggcaatttttataagagacatttttatgacataataagttataataggaataatttgataacttatttctactccataggtgagacaaagttagaacatataatgaggaaatcaataatgaattcaaagatgagatttagaaaatgtgcctcaaaactttgcaaggagtttggttttgctgggctgcaacaatgctggggtgctgtgggttatasgagatggcaccttctctaccagactttgtagctcagatttttccctgtgggccctgaaggttgaaagtggggacaggttttaaccagacttgatttgtagagagatttttatcatcataacctctgatgctggagagaagtgtgtgactttttatgccagacaatcactattactgcttctactcacagaaggacatctgtttggaaaccctggcctgacaatcttcattccagtgcctctcccagatgtcataagggtgacaggttttgagataacattctcacccagacagccacctctgaagttggtgggaatactcatgtgaactgctcagggaagtcagcaagtcttacctcccggcaggcggcagcatgccattgacagctcccgtcccctttctgcgttggtctctagctcactccactgagtgcaaaagcaccatctgcgctcttccttctatgatgaagacagattccatggtagttgcagtcttgtgtggatttaaggcactgttaatgctgaggaattttgctctatcagatttttttttttttctgccgggattagaagatacagtagcagaagtttctgtatttgacctttggcaaagatacctatttcagaataagagaagattttacaacttatttatttaaaataattaatacctaattttttgtaacaaatgaaataatccaaagatataccaaaaagtgtataatttcttcactctacctccatttctatttctctgaaataaccarcgttagcagcttagagtgtccttttatgtatttttctagattcacagaaacatatttatgtatattcatacatttagatttggtttggtttggttttttaaacaaaatgaaatcatgttatatacttttcctcgcaacttaattgtttcacttaacaaatgcatctattggtcatttctttttttatttttattattaattttttttgagacaggatctcactctgtcgcctaggctggagtgcagtggcacgatcatggctcattgcagcctgaactcccgggatcaagtgatcctcctacctcaggcccccaagtagctgagaccacaggcatatgccaccacgccaggctaatttttctattttttgtagagatggggtttcaccttgttgcccaggctggtctggaactcctgagctcacatgatcctcccaccttggcctcccaaggttctgggattacaggcgtgggccaccgcacctggcctccattggccgttttctaaagttgaaaactaattttagcatccctgttcaccagaagatgttaactaaaaacatttatcaagaagagctactacagtttcctttgggattttacgagcaacatgcaatatacctccaggacttcagtcatgtttatggttcttagaatttatgaggcttaggtctgaaatactcctgaaaagatctgataattcctgtgcctgagtcacaggtgccttcagtgagtcccagcctctcacaccgtgatttggggttaaggccagtgtaaccataactccacctcaagcagaactttatcttagtcagttttgagattaagtttgcaatgacctactagtttgttttcaatattcttcctttttaattgtgtcacttaaagcttatcacttgggagtttgaaaattgttctcctcttccaactattttaaaaggaaaagttttatcccagtgactaagtggctctgttaaatagcttagaatcattcaactattcagtatgttgcaaaggctgtggatgaaatagcaaatgaggatattgactttttaaaagttctcatcataggtgtttgccatccccattaaggccatctgatggtagcctcaattccaaatcaccgccacagacatctgtgaatttatgagtatagtggattgtgatataaaatgatttctaactgtgggtcgtggtcactgctctagaaagaagtgagccatggcatggtgtcaaaagtctccacaaataaaaacatagaaaaacctgtcaaccaagaaaactacgtttaatagacctgacgcagtaaagtagaccatcacttagacaagttcatagtagtatctcagaagaaggagggcagggaaaggtatttaaacggagtgagtgctggaccctaatgtaaaccatgggctgcgggtgataatgatgtgtcagtgatgttcattggttgtgacaaatgtaccacttgggtgtgggatgtccatagtgtgggggaggccgtgtctgtggcgtgggacagggtatacgagaatcttctgtaatttccactcaattttgctgtgaaccttaaactgctctaaaaataaagtttaaagtttattaattaaaatttaaaaaaacagggttttgtaaggcagggcagggattgggcagagtatgcactgggcaaagttatgagaagcagttttggattatgagccctgcaaggtgaggtcttgaaggaagccgttggacttgagaagtaagcaattttagttgttctccagttttctcttcctagaggaagtattttctgtagcatacagaaagattacttttatttgatctcagtattttttaacatggagacaggaaatttgtctcatttctcaatgggtttcaccagatcttttctgaggcaacattttcaggaaagtcacagccctaaatctcatagataaatgctggccaattgctgattatgctgtggcaactttaagtaactttgaagaatgttggcccccagggagtgtcaggaaccattgagagcaagagtgtgattctttgccatttttaatagcagtcagttggcctctgccctttaggagttgtttagattggcaactgtggtgcgttggctcagtgcctaggaagactttggaatcttccactaaaatggagttaaccagactttaaaaggctgagactccatagagctacctggtggtagtggaaataaaaccctgggagctgggctttgtttttcttgatcatccactttacctgtatcagcttctgaacacactgtttgatatattagtttcaggacacctagggaccgcagtgctggactagaaaggaacacttgagcaccactggtcattatcaatggaaaaagattgtatcctgagagaatagtggtcagtaactaaacgtgttagaaaacctctgatagctgaactccagactatttttaccatcatttctttgtctgttgtttttctctgtattgcagtgtaaccccagggtcctggcttagaaagttgtacttacggccgggcacggtggctcacgcctgtaatcccagcactttgggagcctgaggtgggcagatcacgaggccaggagtttgagaccagcctgacccatatggcgaaacctcatctctactaaaaatacaaaaattagccaggcgtagtggcatgcgcctctagtcccagctactcgggaggctgaggcagaagaatcacttgaacccgggaggcagaggttgcagtgagctgagatctcgccactgcacgccagcctgggtgacagaaggagattccgtctcaaaaaaaagaaaaaaattaagttgtacttaccactctctttcttttttttttttttgagacggagtcttgctctgtcacccaggctggtgtgcagtggcgcggtctcagctcactgcaagctccgcctcccgggttcacrccattctcctgcctcagcctccccagcagctgggactacaggcgcccaccaccacactcggctaatttttttgtatttttagtagagacggggtttcaccgtgttagccaggatggtctcaatctcctgacctygtgatccgcctgcctcagcctcccaaagtgctgggattacaggcatgagccactgcacccagccactactctctttctttggcagtcttttcacttcttctatttctaagtaaaaactacagagcaaacctaaattcatatttaacatgaagccccagagggtaaacccaagtccaagaaccagattacttgtaaacacacagataatcccttgctggtctagggtctttctgtttactgtttaagccatgaaatggaacgtctactcagtgtcacggttttcacactggagaaacacacacacacacacacacacacacacacacccaaccttacacataaccagtgcagaatttccaacttaccttttgaaaaccaaacgaatacttttttcagtgtgtttgtttgtttgtttgtggttttgtttcttttaaaactacattsaggctgggcatggtggctcacacctataattccagcactttagggggctgaagtgggaggatcacttgaggccaggagctggacaccagacygggcaacacagtcggatcccatctctacaaaaacaaatggaaaaaaaaaaacccaaaaaaacctacagatatttgtctgacactatttacagtaactcctaaaccaatccagtattcagggcctgggtgcagtaatagggcctgtagctgaatgactgacagaaaagactggttgatgatttctttgcacagttgtttgctcagaggaacatgtatgtcttattttttgttgttaaggagaaggtaatttgccgggcctgtggtacaggaaatcctgctcacctgagatactgtgtcacctgtgagggggccctgccttcatcacaagaggtaggttgattgcatgtgccaatcctatatttagtggctactatgtcaatgttaatgataatagagaaacagaatctgccgagggggttggggagagagaccaaaaaaagcttctcatggtaaactgaaagcaagatttccatatgtggggagaactttatatcaatacaaattgttttcaaagtcttaacttcaagaggattcagtaaaatcaataatttcttatgattttgtttaataactttgcatgggaggctggcattagcctgtggggaagtgaactcattcacatttcatttacagacaggtatgtctttgtcatcccctccaccttcccacaycccatagtccattgtcttcgttgactctgtatgcacactgctttttgaaattgagaacattgtagccacctatttcttgggtttcctgccagcctattttgaatgttgaagggaagaaatacgagtatatgcactttaaatacrgtgatgatctattttatgtttataaaacgtttctgatgaaaattaaaattacttccaggtgactcttgctttgtaccggaagaagctggcacttactagccaacttgcttcttttgggttgctgtgcatgtttccgattgtttgtgaggtttgttctcatctcggacagattcctcatgaaactggacaatgtggttattatggtctacagcagcggtccccaacctttttggcaccagggaccagttttgtagaagacaatttttccacggacctggttgggggatggattcaggatgaaactgctcctcctcagatcatcagtcatgagttagattcttataaggaacgcgcaacctagatccctcgcatgcacagttcacaatagggtttgcactcctatgagaatcgaatgctgccgctgatctgataggaggcggagcactcacctcctgctgtgtggcctggttcctaacaagccacagataagtacagtccatggcccgggggttggggacccctggtctaccggtatcaaatgggtgtrtactagtttcctaagcaccatcaactaggtggctaacaacgacagaaatctattgtcttacagctctggagactagaagtctaaaatcaaggtgttggcagggccacactccctctgaaggtgctagggaatgaacagtttcatcttctctcccagcttctggtagcctcaaacttcccttggcttctagatgcagcactccagtctctgcctttgccatcccgtggagctctccctctgtgtctgcctgtgtgtgtatgccactgtgtccagatttccctttttcataaggacaccagtcacactggattagggcccaccctaatgaccacattttaacttgattacctctgtacagacctttttccaaataaggtcccattctgaggtactgagagttaggacttcaacttatctttttctgggcagacagaattcaacctatagcagtggagttggacaagatacctttttttttttttttgagatggagtctcactctgtcacccaggctggggtgcagtggtgcagtctcggctcactgcaacctccgcctccctggttcaagcgattctcctgcctcagcctcctgagtagctgggattacaggcacatgccatcacgcctggctaatttttgtatttttagtagaaacggggtttcaccatgttggccaggctagtctcaaacgcctgacctcgtgatccgcccaactcggccccacaaagtgctgggattacaggcttgagccactgcgccctctgacaagataccttttaatgtcgtctaatcacggacagtctaagagtagttgatttgagggaactccttttgtttccagctttattgagatatgatttatatgcagtaaaattcacctattttaattgtacagtttgatgaatgttggtaattatatatagccattttaactaccaccacaatgaagatatttaacagttctatttaccctgaaaagttttctcattcttctttctagttgagccacttccctggtcaccagacccaaaaaatacagatctgttttgacactatgattttgtcttttatggaagtatgtagttttttgtgagtgcttcatttccttcacttagcagaatgtttttgaggttcgttcatgttgttgcatgtattgattttttttttcattttgattgttgagtactattcctcagtatggatctactggttgattcatccacaggtactcatgctgtttccagtgccggcacactatgaataatgctgcattacatgcaaatctctgtgtgggcatagttttcatttttcttaggtaaatacctaggagtaggattgctgggtcctatttaaacgcatgtttaattttataagatactgccctatatgaaactggaaccttcatatattgctggtaggaacagaagtggtatacattcatatattgctggcatatcacttgtgtttctactagcaatatataaaggttccagtttctctgcatyatctccaacacttgatatcacctgtcatttttttcttttcttttctttttttttttttttgttgttgttgttattgagacggagtcttgctctgtcgcccaggctggagtgcagtggcacaatcttgggtcactgcaacctccaccttctgggttcaagccattctcctgcctcagcctcccaagtagctgggactacaggtgcctgccaccatgcttgactaatttttttgttgtatttttagtagagatggggtttcaccatattggccaggctggttttgaacaactgacctcaggtgatccrcccgccttggcctcccaaagtgctgggattacaggcatgagccaccgcgcccggccggtatcaccaatcattttaatcatgatattccctttttaccattttaatgtatgtaggatctattcccctctttcatgcctgatatttgtaatatgtgtgttctttctttatcattccttctctctctgtctggcttgtaaattttattgatcttttcaagatctagctagatcttttcaaagaactagcttctggttaattcatttgctctatttttttgaatcctattttttttattttgctctttatttattctcttttctttgggtttaatctgattttctttttctaatttttaagatgagaactcaaattattcatttcaaatttttcttattttctaacacaaactataaatttctaagaacttctttggcagcatcctatgtattttcattataattcagtttaaaacattttctcatttatcagtgatttcttctttgacctatgacttatttatttgattccaaaacatatgcactttctctacttatcttactcttattgaggtcaaatttaattccattaatggtcagagagcacactctgtataatttcagttattttaaattaatgaggtttattttatggcccagcatctaacttggaaaacatatcaggtgcatttgaaaagaatgtgtgttctgtcattgttgcgtattctataaatatcaattaaatcaatgtggaatgttgcacagatattatatatctttgcttatttttgtctagtttttctagcaaataatgaaaacggggtattggaaagctccaactataggaagtgaaagacttgtacattaaaaactataaaacattgatgaaggaaattgaagaacacacaaatatagtaatgcatcacttaatgacagggaaacattctgagaaatgcattgttaggttgtttcattgttgtgttagcatcatggcatgtacagtactttcacaaacctagatggtatagcctactgcatacctaggctatctggtatagcctattgctcctaggttgcaaactttactcagtgttctaggcacttgtaatacaaatcacaaggtgatagaggtttttggcttctataaaatatgatggggcccactgtcatatgtggagttcatcattgaccaaaatatcattatgtcgtgcatgactataaatggaaagatatcccatgttcatggactggaggaattaatattgttaaaaagtccataatacctaaagagagatctacagattgaatgcaatccctatcaaaattttgctgacatttttcacagaaatagaaaaaaatcttaaaatttgtatggaaccacaaaagaccctgaatagccaaatcaattttgagaaaaaaaaaaaaaaagaacaaagccagagacatcacacttcctgagctactataaagctatacaggctgagtatcacttatctgaaatrgttgggaccagaagtatttggattttaggttttctggactttggaatatttatgtatttataatgagatatcttgatgatgggacccaagtctaaacatgaaattctttatgtttcttatacacgttatacaaatggcctgaaggtaattttatataatattttaaataacatagtgcatgaaacaaagttttgactgcatttcaactgtgacccatcacataggtcagtttggatttaggascattttagattttagattttcagattagagatattcagcatatagtaatcagaacagcatggtactagcataaaaacaggcatgtagaccaatggacaagaatagagagcccagaaataaattcatgcatctaccatcaattgattttcaacaaaagtgccaagaacacacaatggggaaaggatagtctcttcaataagtggtttgggaaaaactggatatttacatgcagaagcatgaaattagatccttatctcacaccatatactaaaatcaacacaaaatggattaaactgaaaaacttctatyggaaaacatagggaaaaagcttatgacattagtctgggcaatgatttttttcggatatgacccccaaagcaccggcaacaaaagcaaaaaatagacaaacagaattacatcaaactaaaaagcttctgcacagcaaaggaaacaatgaacacagttaagagacaacctacagaatggaagaaaatatgttcaaaccatacatctgataagggattaatatccagtacatataaggaactcaaacaactcaatagtaagtaaacaaataatgccattaaaaatgggcaaagggagcagtcctgcatggcttctgctagcagaagctgcatggtagggcaamctgctgtgctctggggccagatgatgctccagggtggatgaggcacctgcaaatccagctgagcattgcaagccacccagggagagattttttcaaaagcctatgggacataccattattcctggatgcctagtacatttaagatgcctgacagcatgaaaagtacttggaataagtgcaggatgtcacctggaatcagagtcctaagtgatctggactttccttaattctaaatgcggcattcttcatttcaaggtgcctttgagcttctgataaatgcaaactgacaaccctcaaggcacaatggaggggaaatagttggtgcttaaagcctagaagactgcccttaaccaagcaaagtccctgattggcatttgaaatgctgaggcagttgctgtggagacatttttcttatcccactaaataccactttgtggttcttattttttccctagtcacctccgttttaaggattcatcaaaagtccaaatctgtaagcgtcacatatgtggagcttgttggagagaatcctagtagtcatattaattgcaccaaagttttacgggggggatgtagatgaaatccaaaaggtaaaacttgagatgctaacagtgaaatttactaagtgcccttggtgtatacctgacggctttataaacatgaccagttatgtacttcttcatgtacttctttcatcaagagatgtagatatattgtagaaccccttaagaaggaagaggtgaggtttccaatagcatattctatactggttcattataaaactgaaacgcttgacaggctccagagagccatctatatgcctcagaatttctattgcattcatgtggacaaaaaaaatcagcagattcctttttagctgcagtgatgggcattgggtcatttcagtaacatctttgtggcctgtcagttggagagtctggtttatgccttgtggagtcgggttctggctgacctcaactgcatgagggacctctgcacagtgagtgcagactggaagtacttaatacatgtttgtagtatggattttcctattaaaaccaacctaaaattgttaggaagctcaagttgttaatgggtgaagacagtctcaaagccaagaggatgccatccaataaagaagaaaggtggaaaaagtggtatgcagatattaatggaaagctgacacatgtggggactgtcaaagggcatcctccgctggaagcacccattttttcaggcagtgcctattttgtggtcagtagggagtatgtggggcatgtgctagaggatgaaaaaacccaaaagtttatggagtgggtgcgaggcacagacagcccagataagtatctctaggccatcatccgaaggatcgctgaagtccctggctcattcgccttaagccataagtacaagttgtctggaatgcatgccgttgctaggtttgtcaagtggcagtactctgaggatgacgttttcaaggatgctccctacccaccctgcagtggggtctccatgcactcagcatgcattttcggagccagcagcttgaactggatgctgtgtaaacacctatgggtgcaagcttatacgtttgacatggatgttgacctccttgccacctagtgtttggatgagcatctgaggcataaagctttggagactttaaaacactgaccattattagcaattttgcgaataagaagaaggatgcacaaaatgcccrctatctcattcatcttccttgtcaataagcawcagaaaagttgtttggggtcctatttggggcagggactttaaatcttcatgtcagagaagctgcatgttttctgcagagtacaattggctagaaaggtgttataatttctactttaaacaattataagggcttgtaagggaattaagaggaaaaaaccaaaaagataaagctgtttktttttttttttgtatttacaccaatatttatttttacyatttctgatgttctttactcttctctgtggacctgagtttctgtctggtatcatatcccttcacacagaggaactccctttatcacttcttagagtgcaggtctgctggcagtgatttctcttggttctcttttacctgaaaatgtctttatttcaacttcattctcaaagagtatttttgatgaatatgtaattctgggctgacagttattttctttctgaactttaaagctgttccacactcttttggcctccatgctttctgctcaaaagtcaaatgtaaatcaaattgacattttcatgtacgggatgtgtcatttttctcttgctgcttttaagatttgctctttattgttggttttcagcagtttggctataatgtgctttagtgtgaagtaattctggttggtgttcatttagaatcttgtcgctgtaaatttctgtctttcatcagatttaggaattgttcggccatgatttctttatttttctactccactcattttctactctccgtctggaagtccatgtacacacctgttgaattgtttgatattatctaataagtccctgaggttctgttcatttttttttttttttttgagatggagtctcgctctgtcatccaggctggagtgcagtggcgcaatctcagctcactgcaacctccgcctcccaggttcaagcgattctcctgcctcaccctcccgagtagctggaattacaggtgtgcaccaccaagcctggctaatttttgtattttcagtagaaacgaggatttaccatgttggccaggctggtttcatactcctgacctcaagcgatccacctgtctcggcctcccaaagtgctgagattacaggcatgagccaccgcgccagtcctgttcattttttaaaaatctttttttctcttcacattgtatgatttctgttgatctatcctccagttcacttacactttcctttaccatctcctttagctattcagtccgtctagtaaatattttattttaaatattatctttttctattccagaattctcacttgtttctgtttttattgtttctatttctttgctgagatttcctctttttattcattgtggacagaatatgctttaaatttctggtttgcttctttcaacatctgattcatcttaggatcaattttgtgtgtgaagcactagttatagtttgttccaggcagcacattccccaaaagcaagcatatatatcattgcctactaaaacaaagcaaacaaacaacaaaatccccagagtaacagaatctagaaagtaccacagctgaacattcataatgctagggtacaatttaaaattcctcaacatactgaataccaagaaaaaaatttgaggggaggagggacagaaagtttggtctccattcagatattttatctttagctgaactgcttcaagcctattctgtacatatgttgttcaaggattggtaaaagatctgaatacacagagaagatcttctctctttcttgtttctttctgggagctccctgcctcttcagcagccaaatattccccagcttcagttttctggttctcttggccagaaatactgccttgtgcccaccgcttcacatgcgctatgtagactacccttagctccaggctgaaaactgtgacgatgggaactgactttgtataactcccctcctgcttgtatgtacttgctgcaactctacctgcttctgttcattctctactgccttcatgtattatcagcagatttttttttttgagacagagtcatgctctgtcgcccaggctggagtacagtggcatgatcttggctcactgcaacctctgcctcctgggttcaagtgattctcctgcctcagcttcccaagtagctgggattacaagcatgtgccaccacgcccggctaatgtttgtatttttagtagacatggtgtttcaccgtgttggccaggctggtctcgaactcctgacctctagtgatacactcgcctcagcctcctaaagtgctgggattacaggtgtgagccaccacacccggcctattatcagcagattttatagttgttttttgtgtgggagtcatttattatggtcttatgctatcattaccagaaggaaaaatctgtagttttttttaaaaaaagatgatttctgttacatacgatgtgtttctttttcagaactgagactaaaaacaaactaatgaggtgttgaatttcatcagaaaacacatctatttccacatcaaagctgatgtaattttagggttctcttttgttgagagttgtctattaatgtggttttagacttgatatcactctctcatcataaaatgacactctataattttttccaaggcaccagagagagtaatagtgagattgggaaagcataaaaatagaaaacagtggaacttctggaattcttgaaatattcttacagatagatttcagtaaattgccagcaaaagattttctcagacatcctttcctcaggcattcaggacttcttatgtaaataataaaaccatttaaattgattttgttaactgtcagtgatgtaactgtttctgggtctcatctatcaacaaaactattttcagaacaatcccaaaattgaatttgttctaaaaattgtatttctatctgaatggtatatcagagcttagatgccacaggataatacttatctctgtagtccatagaagtaacaatgcatgttcattctgatagctttatgtcttttctttgtttagcagcattaatatgatggggtaagataacttttctttctcttcttttttttttttgtttttttttgtttttttgatcagtaagactaccagaaagataacttttctttctttaaagcaatgttatgtttaaaagccacttgaacagtcagtacatttcaatgaaaagtctgaaggctttgtatttagaaaccaaggtcagcaacctttatgccaaaatcctgttttaagaataggataattgaaatgtaagttctgaagcaaaagtttgcagagaatttctctttgatttacctgaaggagtttccctctaattgcacagaaatgaaggcaagcgcacacaaagaggccctctgttctcgggtgtctrtgaatgctgggggctgatgtggcctctcttgagtaggtttctattctagataacagagcggtccctgaagcaaaacgggatagagctgggcagatagagtgaactaaaatgtgtgtctttagggaaaagtgcccttagcmaatgttttccctggtgtgcgtgttcttagtattgtgcctggcatatgtggtaatacacattcagttaccaattgaatcagtcattcattgactcagtaaaaccttttgaatgactcccatgtgccaaggtaccaggactgtcctagtgcggggaataaaagtgaaattatagtcctttctcctgaagaaatcagggtctagtggaaaggaaggtgggaccggaaggaagctggccggtggagcttggccctgtgctaagcattcctatccacttaactgtgggtaatcgtctgaaactccctacagacctgggagtaagctattgtattgaaggggctgtatggagtcagggagagaagccaggctttagagtcagatggctctaatcgtgcatctcaccctctctgtgtccccaagctctccctctgtaagatggggacaatgacagcacccacctcccaggtctacagtgggactgacgtgagggtgcagggcagtgtgggaatggagcctgcacatggtgggtggtcaggtagcagccactgtgctgtcactcccatttgggaagtgagcaagtctcctaccaggcaatagtgaggaagcaacagattcaaatataggtttacctaacatagtcccaggaattctcacaaaacaattctgcctctgtccccaatataaaataattgttctcatgtgtcaagaatgggaaatgaagtcacatttttctatggaaaccaaaactccaaaggatagaagataagcctcaatcatgaccgctcaggtagcttagctctcttcttccttcattaatattgttctgttaaatcaacagtagggcttgctatccctgatattaaagatattgaaaaatattaagatgtgcaaggtaccagtttcattgactttctgttatctccatgaaggaatgtgagctctatgtactaatttattaattggtgaaactcatcatagctgtactcctttgggaaaaaaacaaaacaaaacaaaacaaaaaaaacactatttccggggctcatcttgtctgggaattttttatcttttttgaattgggagggggattagagaatatagtactgatcctgcctttaaatgccatttcattcaccagtcgatgtgcagtggggataaagcccctcctccgcccactcagaaaggggggaccatttcctgctacagatgtggtcgctggaatctctgggaggcgtccttctgcggctggtgtggagccatggtgggtattttaaaactgagattctgtatactgagcacctcaccactggcctggagagagccaggcacttcttccatggccttgcagaaatcacttcttgtgatttcgctactggtacctataacctaagaatctggagatagagataattaattatcttacaytgagagccatctctgatgactgttttgacttgcatttctttgaggttaaaccttttcactcgtttattgactactggcattttttaaaatgaattatgtctgcctgcctttataataaaacactcaagactaygtatttatttaagtatcgcatgcaaataacaaaaaagttttagagtgaagggttagtctcctctctctctaagtcccacagttctcctctcagaagcaattgctcagatccagttcttgagatgttctttcagctattcaatgcatgtataagtaaactggtgctatgaacactgacccaattattttcacctagcaaggtgtcttgttagtaacctcctcattcttttcagtgacttcataatccattgtttgtatgtatgtactgtgttatatttagaccatccctattgctggacatgtgtgttgttttcagtgatttcttttaaaaccacagtgttttaggggttgacctggagtacacttctttctgtacttgtccatctgtaggataaattctggaaggtagaatggctgggtcagagagtctgggcatatgttaatttgtatggtatgagaataatttacatgaggaaattataactctaatattcatcaagatattttctatcctctagctcggcattcctgctggctgttctgtttgccctaaatgtggggccagcaatcacctgtctgcccgattctgtggctcctgtggtatttgtgtgaagtccctagtgaaacttagcttggacagaagcctggctctagctgctgaggaacctcgccctttttctgaggtgaggcctcccctgtagtaagaactggtacccaggaagaggctgtaactctgaatgtgtgtgctccaccctgtgaatcaacccggggaagagacccaaaacttttagaactttcacatggaatttcaactaggtgtgtaaataaatgcagtcaatttagattttaattgcatttgcaaggccgtagacataatgccactttagtggctttaaaatacatgagacagaatgcacttctcttgaatttcttatgtagcattctgagaacttttccttccccttttttatattttagaaagcttagggtatataagattgcttttgtaatttataacagctgggcatagtttgaggacaaatctcaccaggttattttcagaagtacttaagctctaacaactggctttgtgttagatttttataattttatacatttctctaagctggataaagactttccatgtttcttcttatctctttattataagaagttaaagattgatcattattagaggatacactcagcactttgtatgcagttttagggagttcatgaccttttttttttgagacagagtctcgctgtgttgctcaggctggagtgcaatggtgcaattttggctcactgcaacctctgcctcccaggttcaagcaattcttctgcctcagtctcctgagtagctaggattacaggcccgtgccaccatgcccggctaatttttgtatttttagtagagatggggtttcaccatgttggtcgggctgatctcgaactccttacctcgtgatccacccaccgtggcctcccaaagtgctgagattacaggcatgagccaccatgcccagccgttcatggctttcttaacccagtttgaaagatttaaatcctaaactgccactagcccttattcctttgtgcaaatgaaacaaaggtgttcttttctcaagacacttgactgccatctattggaaattgcttgtaatatactggtttctctactagaaaaattaccctaatacatatgcaaatatatgatgttcaccatatgaatggtactactttgaatgcagtgacgttgtgcaacgcacaacctttcatggtagtcctctcaggtccccaggtttagatgcaggaaagtatgttagagaaaatgttggtgaccagtggctgagtgtggattagtagtgaagtctatgctctattggattacagagctgaaaaggatagatatcttccaggcatcaagcaggccggcaaacaccccttgatttgctgacttttagataataaatggctaatcctggatcaggctggaagttgctgagaaagacaggagcaaggaagatgaggcaaaggctggaaaaccctattagttccaagtacacttttcttgagataytttttattctgattagagttgttttctataagtaaaatgcaagattgattaaattatattctaattttaaaaatgtcttctgcctcacgcatggccccgatgtgcctggcagtccctgaatattcctttgcccagatctgatgttgggactaagagggacataggaacacagactgttggcctcttctacccatctggcaagctgctagcaaaaaaggaacaggaactagcctctcaaaagcagaggcaggagaaaatgagtgaccataaacccctcctgacagccatcagcccaggaagaggtaagggggaggatgccctttcttctggtcgggagggaattcactctttctgtgaaagaacatttcattttctcttccttttagatttatttgtatgtgtaagaagtaagtttctttcttttcctctttttcaagtaattttctttgtattggaaaaagaagctcttcctgtaagctccttcttaaactttcagtattctgatgttttagctcatagccctgtagtctagttcctcagtcacatggcgcatgtgggtttcttttgtcgtgacggcatgttgttagtgcacagtgctattgctatctgccattatccctttttttaattgtaaaatttaaataacataaaattcaccattttgactatttttaagtctataatttgggccagttgtggtgactcatgcctgcaatcccagcactttgggaggccaaggctggaggatctcttgagtctagtctggccaacaaagtgagaccctgtctctacaattttttttttaaagcagtcatttgtggtggtgcatgcctgtggtcccagctacatgcttcaaatttcattttgaaatttaatctctattgtggtggtattaagtggcgggacgttttggaaattgatcatgaggatggagccctcatgaatagatcagtgccttatgaaagggctggagggaatgagttaaggcccctttttgtcctttggccctccctccatgtgaggacacaacgttgccctcctttggaggatgcagcaacgaggcaccattttggaagcagagagaccaggccctccccagacacctaacctgcagggacctttattttggacttctagcttccagaatgtgagaaataaattcctgttctttataaattacccagtctcaagtattttgtttatagcagcacaaatggactaagacagtttgctagtattttcttgaagacttttgtgtctatatttataagagatattagtctgcagttttcttctttccttctactgtctgtctgattttggtatcaggataatggtagccttatagaaacacttctttttttttgaagtggttatgaagaattggtattaactattatttaaattttggtaaattacctgtgaagctatctggatctgatgtttgtctagtgggcaattctgattactctttactttttataggtctgttcagattttctatttcttgttgaatcagttttggtagtttgtgtttttccagatatttatctatttcatctgattaatttattagcatacagttgtttgtgatactcttttataatcttttttatttcaataaagttggtgataacatctcctatttcatttctaattctagtaacttgagatgtcactttttttggtcaatcttactaaaggtttatcaatttcattgatcttttccaagaaccaacttttggttttattgattttctattatttttatattctgtatttcactaaattccactctcatcatgatttccttctttcttcttactttaagttgactttgctcttcttttcctcgtttaaggtcaaagattagggtgatgattttgagatctttcttcagaatgtgaacatttgctgctataaatttctgtttgagctttgctttcactgcgtcccataagtttcggtgtaccttyattttctttctttctttcttttgagataggatctcactttgtcacccaggctggagtgcggtggcacaatcatggcacactgcagccttgacctcctgggttcaagtgatcctcttccctcaatctactgagtagctgggagcacaggcacaagccaccacacctggataatttttaaacgtttttgtagagatggggtgacactgtgttgccagtgttgccggtctcaaactctaggtgtcaaggaagcctcccaccttagccttccagagtgctaggattacaggcataagcccctgtgtccagcaccatgaatcagggttttttgtccattctgacaatccctgtttgtttkttttttaaattggattgtttcatccatctacatttaatgttattattgataaagttggacttatcattttgctttttgttttccaaatgtttctaaatgccttttttgttcctctgttgctcctttactgctttcttttgcattgcatattttccagtgtaacattttgatttatttaatgactttttcactacatactttgagttatttccttagtggttactatagggttttcctcatacatcttaacagactatacttcaagtttatactaaattaatyccaatgaaatatataaattctacccctataattcaattccctcttcccaacttttgtggcattattttctaatataacattatgtttatgtttacatatatgttataaactctcaaaacactgttacaattattagttataacatgatgtcttttaaaaaaagaactattatttatggcttttgttatattagccttcttttcccccatttatagttctcttaatttattcctttggattatttcctaagcccaatgaagctttgctcttactcacctccctttttttttttttttttttttgagacggagtctcgctctgccacccaggctggagtgcggtggcgtgatcccgactcactgcaacctccgcctcctgggttcaagcgattctcctgcctcagcctcccrgataattttttgtgtttttagtagagacagggtttcactgtgttagccagaatagtctcgatcgcctgacctcgtgatccacccgccttggcctcccgaagtgctaggattacaggcgtgagccaccacgcctggcctcacccaccttctttgtgttgttattggtcaatatatcttatttctatatgttataggccaaactgtataattatattcatattcatattgttttacatactctctttttgaatctgttgagaagaagggaaaagaaatatgcatttataatgtcttttataattacataattacctttactggtggtgatggtggtgttggtggtgtgtgtgtgtgtgtgtgtgtgtgtgtgtgtgtattcatattactctctagggtcatgtgctttcagcctaaagaacttcataagtattcttataaggtagatttgctagcaatgaattctctgtttttgttaaactctactagctataagattcttgctttacagttgttttctttgaacactttgaatacgttgatctactgtcttctggcctccgttatttctgatgagagttctgctgttaatatactggggatcccttgaaccttaggaatcacctctctcttgcttctttcaagattctcttcttgtcatattctttcaacagtttgataatgtgtctcgctgtggatctctttgggtttatcctacttgaaacttgttgagcttctttttaaaaaatttttaaattttttatttaaaaagtttttgtgggtacatagtaggtgtatatatttatggggtacgtgagatattttggtagagccatgcaatgcataatagtaacactgattgcataaacaaacaaacttgcaaaatggaaactaataaaaactctagatttaatcccccctgctttttaactttttgttttttctctttagtgttattgtactgtcttaaaaagttgtagttattatttttgattggttcataatttagtctttytatttaagtcaagagaagttcacacaccacaatgccagtgttatgctattctgtgtttctctgtgtgcttactattacccatgaattttggaccttcggataatttcttcttgctcattaacatccttttctttcagattgaataactccctttagcatttcttgtaaacagtctggtattgatgaaattccttagcttttctttgggaagatctttgtttctccttcatgtttgaaagatatttttgccagacatatactattctagggtaaaactttttwaatttttttcagcattttaaatatgtcatgccactctctcctggcctataggatttctgctgaaaagcctgctactgaaggtattggaggtccattggatgttatttgtttctcttctcttgctgcttttaggatactttctttatccttgaccttttagagtttaattatgaaatgtcttggggtagtcttctttggattaaatctgcttggtgttctataactttattgtacttgaatgttgatagttttctctaggtttgggaagttctctgatactatccatttggtttttttgtttgtttgtttgtttttttgagacggagtctcactctgtcccccaggttggaatacagtggtgtgatctcarctcactgcaacctccacctcctgggttgaagcgattctcctgcctcagcctcccaagtagctgggatagygggcgtgagccactatgcctggctaatttttatatttatagtagagatggggtttcaccctgttggccaggctggtctcgagctcctgatctcaratgatccacccaccttggcctcccraagtgctgggattacaggtgtgagccaccgcatctggcctgatactatccctttgaagaaactttctactcctatttctttctctacctcctctttaaggccaaatactcttagatttgcccttttgaggctattttctagatcttataggtgtgctttgttgttttttattatgttttcttttgtctcctctgactgtgtatttttgaatagcctgtcttcaagctcactttaattctttcttttgcttaatcagttctgctatctagagactctgatgcatattttagcatgtcagttctattttccaactctagaatttctacttgattctttttaattattgcaaactctcttaaatttatctgacagaattctgaattccttttctgtgttatcttgaatttctttgagtttccttaaaacagctattttgaactttctgtctgaaaggtcatatatctctgtttctccaggattggtccatggtgtcttatttatttcatttggtgaggtcatgttctcctgaatgctggtgatgcttgtagatgctcttcagtgtctgggccttgaaaagttaggtatttattgaggtcttcacagtctggacttgtttgtgcctattgttcttgggaagggtttccaggtattcgaagggacttggaccccaagccccataacactgtgatttttgcagacttgtagaggtactgctttgtggtcttagataagatccagaagaattatctggactaccaggaagagattcttgttattttcccttctttttcccagacatacagtctctctttgtgtgctgagccacctgaaactaggggtatggtgatgcaagcactcctgtggccaccactattgggactgagttgggtcatacctgaagccagtatagcactgggccttgcccaaggtcctaaccttccaggtggtgagttctaccaggccttgagcatgtccacagatgctgtcgggagccaagggttagagtaaaaaaacataattatttacttgatgttctattatattgcagctaagcaatcaaatcatagaaagtctttcctgctcttccctcccctttccacaggcagaggaacctctccctgtggccaccaccactactggtccacatgtccacaggggattctgccaggccactgccaatgtttgcttgaagcccaaaggctcttctgttagcttgtggtgaatgcttccaggcctgggactcacccttcagggcagtgggctcccctctggcccagagcagatccagaaatcctgtccaaggccctaggcctagactcagggaccccaagagcctgcttgttgctctcccccactgtgttcaagctggtacctagggtgcaagatgaagtcccctttacttttccctctgcttttctcaaacagaatgagtcttgcaccatagccactacaacttggaatgtgctgggtcttccctgaagttagcacatattagagcacaaggcccacagcatactccctgggtattgctggtggttatttgggcccaggggccctttagtcagcagacgatcaatcccgctaggactggggccttcccttcaagacagtgagttcccttctggcccaggatttgcctagaaatgtcagctgggagctagggcctagaaggggggccttacggctctgccttatgccctgtcctactgtggctgagctggtatccaagatacaagacaaagtgctctttactccttgctctcctctccttaagtagaaaggagtcacttttgttgccatgagctgcactgcctggagttggagaaggaatattacaagtcctccttaaaccatgccagctggtgtctccctaggtcacgtgccacccgagtttactgcctctgagcctagcctagcactaggagttgcctaggaatttcagtctttgtgtcctagactgcctttcaagtttacctatgatcccagagcacctcggccaccagtggcgaggcttgctgagaaattcaagttcagaccactaggatgagcaatttccctctggctacggttggtccaaatgctccctccatgtgcgggcactggctgagcccagcacggctttattttcagctgtgacagggcagtaccgagttcagtgtacagtcccccagtcactgtgctctccctccccaaagtgcacacattctctttccatsctgtatagctgctgctgggggatggggaaggatggtatcagtgattcaagaccgtctctcctgcccttctcgatgcctcttttcacaatatgaagttaaaaccaggtattgtgattgctcacctgatttttggttcatgtaatggtgcttttctgagtacagatagttgttaaaatttggtgttccagcagggaggatgaatgatgtaggctttttctgccatcttgctccacctccagctttttgagcttcttggatgtataaattcatgtcttttataaaatttgggaagggtttggcaatcatctcttcaaatatttttttctgtcccatttctctgtctcttctccttctgggattctcatgtagatgttggcatgctcaatagcttccaatgggtctcttaggctctgttcatttttcttcattcctttttctctcttttttttacgttgtataatatctattgacctatttttcagtttgctaattcttttttatcctacttcacatttactgttgagcgcctcttgtgaattatctattttagttattgtacttttctgctacatattcttatttggttttcctttcatgtgtttatttatattctcttatttcaggaagaattcttccttctttttttatttttattttttataggcagastcttgctctgttacccaggctggagtgcaatgatacaaatcacagctcactgcaatctcaaactcctgggcttgagcaatgctcctgcctcagcctcccaagcaactgggactaaaggtgcacaccatcatgcttggctaattaaaaaaaaatttttgtagagatggggtctcactatattgcccaggctggtctcaaactcctggcctcaagcaatcctcccacctcagccttctgaaatgcatcataatttcttctatttttttttttttctaagagtcaaggtcttgctctgtcacccaggctggagtgcagtggtgcaattatagctgactgcagcctccaaatcttgggctcaagagatcttttcatctcagcctctcgagttgcagggactacatgtacattccactactcctggctcttcttttactccttttaagcatgatttcctttagttccttgagcatatttataatggctgctttgaagtcttaaatcttcaactctagttgctatcacaggcagtttctgttgcatgttttttcccctgtgtttgggtcagagtttcctgtttctttgcatgtctcatgatttttttgttggaaactggatgtgttagataatatattgtatcaactctgggtactgacctatcttccaggcttgttattgttatttgtttgtctgtttgtctgttcattttagtgaactctatttcacccccacagtatgaagcttctgatgtgactccatggagagtgtagccttggcatgcaccctgtcaccacaggatgatggtggtttggcagggctctctttgtctctttcctgaccacacctagccattaagctgtgcttattgttggatgattcctgtattgttttcaaccatgacctggggcataaattgcttcacggactggtttaattaaatttggcatcctttacagcaggggtatccaatcttttggtttccctgggcsgcactagaagaattgtcttgggccacacataaaatacactaatgctaatggtagctgttgagctaaaaaaaaaaaaatctcataatgttctaagaaagtttaagaatctgtggcccggcgcggtggctcacgcctgtaatcccagcaatttgggaggccgaggtgggysgtctcaggagtttgagaccagcctcgccaacatggcaaaaccccatctctactaaaaawacaaaaattagccgggcatggtggcaggcatctataatcctagctactcgggagtctgaggccaaagaatctttcaaacctgggaggcagaggttgcagtgagccgagatcatgccactgcactcctacctgggcaacagagtgagaatccatctcaaaaaaaaaaaaaaaaaaagaaagaaagttagtttatgaatctgtgttgggatccattcaaagtcatcctgggtcacatgtcrrcccatgggctgtgggttggacaacctggctttacagggattgttttttaggtcagtgtttgaatatttttcttacctcaggagggctcttcttagctgtttatttctctgatctgagtaaactggctggcctatttagctcacatctctaatgaatcttctagtcttcttttaactgctttttaacacaccctccattgytttgaaagcagccttaggcttgaactttcccacactttgttacaaatgaagtctgtttctttggggagagattctgaactctgttttttgacctgcctcttcccctgggcaaaatctctgagccaatgctctggatggagacaatggcatgttttttcaatgtggcaccattgctttaggggctgggtaagcaacagagcatgtgcagctgtagcctttgttcttcatgacttgcttctcccaacattggacttgtgctgaatgatccaggaataggtggtctggaccccagtattctcagtgtcccagatcaaaggtagaacatctatcccatgagtggtaactgagcagagaaagggagcccccatctcttgaccacacttggccagaacttagcctgtgcaaagggcaattgggacaggatgagaaatactgaagtccctgtccttcctcggaagatactacacccctttgggaactctgaggagagggagccctgtgtactcatctgcacctatatggagtggagctgagaacatgtggaagggagtggcccatggttcaaacaccacagactctcatgattctgagttttggtatattttcattaaatgtttattttctgtatggctttagaaccatttctagatggctctaaagtacttgtgatggattttgctgttttttaaaatagttttgtttgcagtggcaaattcttacaggtctgcagcaacctcagttcttgcttccaagaaggaaagaatttggccgagaggcatgaggcagagtgagagactgaggcaagttttagagcaggagtgaaagtttattgaaaagttttagagcaggaacgaaaggaagtacactttgaagaaggccaagcggstgacttgagagattcaagtgtgctgttcagcccttaatgtggggcttatacattggcatgtttccagagtttgcattacttctaccctgattcctcttggtgggctgtccccatgttcagtggcctgccagtacttgggagggaccacatgcaccgtatgtttatggaagttgtgtgcatgctcacttgaggcattcccttatccattgagtgttcctagagaaaggtcatgtaccagttaaactctgccatttttcttcttagtgcacatgcctgatcccactcgtccaactcctgagatctcatcgggaagctgctgatcaccagcttcaggtgtcttctatctattgggagaccgctgtcccctggcaccagctgcagccaattgttattttagagaaagtttaacaactgcctgaccatcacctgatggtcacctgacatttctgggggttgggggagcctttcctgccctgctcatgtctccctagctacctactctaacaattttactggggagtaggtccactcaaatccctaggctgccatgccagaagttggtcattcccagatcttctttgccctctggatgtccttagtgggagtcaaaacccagcccacagtctgactgaagtcttccagatataaatgtggtatcagacctgtggtagattgtctgcagagatgaccagaatcactcctcacatccctcctgtccttaggaggaagaggctgtttctcttcctttggaatctggactgaccttgtgacttgctttgacatagagagtgatagaagagacaccgtgatagttctgggcctaggccttacgagagctgaaagcttccacttaactctctaggaagtcagcactgtgtaaagaagttcagtatagattactgaattagaagagatgccacatgaagaagaacagagcacctgagccagcacccaacccaaagactcyagacatttgaatgagtgcaggtgaaggctgagccatcccagacagctcccagtagtttgtgccatcttcgctgaggccttagccttgtggatgaaataatcttggatcccatagccctatttgagatggctcaactgacaccatgtggagcagagatgaamcgtccctgcagagcattgaccatattcttgacccacagaagtatgggcagtaaagtggttgatgttttaaaccactaagttttggggtgttttgtttggtagcagtggataatagaaataggttttcagtttcctgtagcagaaactagtccctttgaattccctcgttcagcctggggactcacagtcttacaatgaccctttccaaaggacttcctcacaaggtccttactmagtgcttttttgagagttgagatttcattttagaaatatacatctaggccaggctcggtggctcatatctgtaatcagaacactttgggaggccgaggcaggcagatcacctgaggtcaggagtktgagaccagcctggccaacatagcaaaaccccatctctactaaaagtacaaaaattagccaggtgtggtggtgggtgcctgtaatcccagctactcaggaggctgaggcaggagaatggcttgaacccgggaggcggaggttgcagtgagcygagatcatgccactgtactccagcctgggtgacaagagcaagactccgtctaaaaaaaaaagaagtatagatctattgtattgtagcttctcagtcagaacctcattttaaacatactcctacatacgtatttatttattttcatattatctgtgtccactaagaatgtaagatccttgagggcaagaactctgttcacttctgtatcctagccctagaatagtacatgaccaatagtaggtgcccagtaaatatttgtgggataaatggctactttgtgtcaaacagtgcactaggctcagtatgatctctagtgttgtctcgattactcatagtggactctccagatgccccaagccagatctcagcctgcttgttttcagtgcagctgtggtggatggtttcacccatcattgctagcatgcctcatcaaatgtgccccattctctctctcactgttttatttaaataattttatctctcttgactttgctgcctccaacttcagagcaggagaaggctgcctatccgtacacaggtgcaaccctgaagcactgggagttgacactacttgggctgccctcactcatgggcaagggagccggggagcagatcccctagcttctctgtccttcagcagacaactgtgagacatgttctccatggtccctcatatccccagcaagatcgggccccagttgcccagggtattaactagtttttaacacattcgttcttccttcccttccttgtcctgctctttatacgccatcatttgcatgtcccacggtcaccttccaaagaaaccacctgtcctaagtctttatctcaggttctgctttcaggggaacccaagtaagaacacttaggttctcttgtcacaataacacatgaggtagggggtattagttccattttattaggtaagaaaagtaaggcttagggagatttaagtgtctggctcaacatcactaagctaataaatggtagatttaggatttaaacgcaggcttgtctgaactccaaattatgttctctttccactgaaccatgctgcatgaccttggaaaatccctctgattgctttcagcttagtgtcttcatttgttggtgggatccaatgtgggtttgcagagtcaagtggccacagggcacagcaggggctgtggctggctggagagcctgtgccctgtccaaagcagccagctgctccttggcctcaggtggtcagcctgtgtgggaaggtgagcccagtgcccctgcgtcttccgcctgcatatgagaaaccgggcaycagactcacgtgaaatctcycaagttttaaatggtggcaactaattcaaatgtgtcttaaaccctgtgcagactggaaagggacccaagagaactttttagagtgatggaaatgttttatatattgattggggtgtacacgtttggcaagccccaaatggtacatttaaaatattgtgtaagggctgggtgcggtgtctcacacctataatcctagcactttgggaggctaaagcaagcagatcacttgagcccaggagtttgtgaccagcctgggtagcatggtgaaactccatctctataaaaaatacaaacactagccaggcgttgtggtgcgtgcttgaatttccagctacgtgggcggctgaggtgggaggatcatctgagccaagggaggtcaaggctgtggtaagccatgatcacaccattgtactctagcctgggcaacagagtgagatcccatctcaaaataaataaaataaaatattaggtaagttattgtaggtgggatagaatcatagaaaaagaaaagaccccatgtgtggcaatcaaaatatgttcttttaagtttcttttttttttttttttgagatgtagtcttgctctgttgcccaggctggagtgcagtggtgcaatctcagctcattgcaacctccgcctcatgtgttcaagcgattctcctgccccttgagtagctgggactacaggtgcacgccaccatgctcggctaatttttatattattagtagaggcagggtttcaccatgttggccaggctggtctygaacttttgacctcaagtgatccacctgcctcggcctcccaaagtgttggattacaggcgtgagccaccatgctcggcctcttttgaaattctataatagtctatgattaattacatgtaacaagcagttatggaggaaaatggaacttgttccagagcatagttgaggttcactaaggaaagtccatcacaaagtttgacaaaggaaattaacctctctaagaacatatgttccatgctatcatttttctttcttagtctcaggagaatcatccagatggcggggtttctcttctttcttagggtactggagaagacagctggatcacatctctgctcacctcaggtgttatgctcagaacaaccctgaattccgggccttgattgcagaacccaggatgggaaaggtgggtgagatgaaatttccactccacaagtgtccacgggatcaggctgaaggaaccctccatggactttgcctgaaactgcatcttgcctggctcctttccctttcctgctctgctttctacactttcttactcttctgccttgtgagctctgctctaataaatcacttgcacatgaatattgtctcagagtctgcttctggggcacctgacctaagacaataaaattctgaacawctcatgctcagatgtcacattggaaattctaacagtcagaatgaaaggtcccagaacaatttaatccatccagatcgtgcacttaaatcatacactgttaatatatagcaatagtgacataacagctgccattttacagtgcacccagcatcagcattgtattcatcattcttgccttcacagcaaacctgcaagggaggtgtattacctttgtgatcactttaaaaaaaataaccacaaattccttgactgtcttcccctcaaatggtagaatctgtgtcccctcaccttgaatctgggcgggtctgtgactgtttgactaacggactatgatggaagtgatgccatgagacttccagggcttggccacataaggtcatgtggctttctcttgcttggcacactcacctccagcacttcttggagctcagccaccctgctatgagaagcccaagctacatggagtggccgcatgtaggtgcgccagctgaacccagtcctcgagtcatctctgctcatgagccacatgagtgactagactctagatgattcccgcccccagacatccaaccacctctagccatttgagtcttccagctgaggcctcagacatgtggagcaaagacaagctatctctgctatgccctctctgaatccatagcataataaagtggtggtggtttaatttcactaagtttggggtggtttttcacacckcagttgatagtcagaagaagccttatttgacacccaggaattttgaagctcagagaggtttggtgacctgcccaagactacactgctgggtctcatggggttcaagatttgaagcagatctgtcggaccctgtcagagtcccatgtcctttctttgatactacattgccattataaaaagacagctctgtgagaggacctttcctctgtttgtcgcaagactagaaggaactttatgaaataggctgtgtactcttctgctgccaaataggccaacatcaagacgatctcattttccagtattacccaatttcctttgataatctattttggtagtttatgaatttcttcagcctaatccagagatctgcaaactgtggcggttgagacaaatctggcccgctgcccaattttataaataaaattttattggatcacagctgcacccattcctttacttatgtggctgctttgtgctatgacagtaaagtattcacaatacagaacatatggtccacaagacctaaaatatttactatctgacccttcatgaaaacatttcttgtcccttggcttaatctaaattcctattgctacttacacagaaagctgctcaactgtgatacttgtcccttaattaccaagccctgtccccgccccctaccaggatatcttttccaaggtgataacatctagtcatgtagtttgattaaagtgcatctcttgaagaatgcatagatttggatcttgcctttttattcaatttggcagtctctttagagtagtttatttataattagtagagtttagatatggttggatttggatctgccattttgttctttgttttctatttatctcgtctagtttttgttgctctgtttttcttttcctactttcttctgtgttaattaaatatttggttaaatttagagtttgacatctcagaatttgtacactgttacttaaggcaatgagtcccacacccacagttatgaaytctctctacaactcttttaaaagcttatctctgctactgtccacgaagatggttgtgaagttagcatcagactgaattatagtcaagtctcaaacaaggtgagtaagcctccagaagttattcatttgagaactgaccgattagtaaattgagacaatttatagaaatgcttctgtgtaatccayagaaaggaaaagtttcacayattatgaaatgctactagaggcaagcaatttcatagaattagataaacaagttaaacctcagacaggcacatgaagatatagtgagaacaggagttgttctgtagttctcaggcttattcagactcactgaagtctgatggcatgtctgtgatataattgatttggggaaagactaacaaaaatatttgctgatatgccctttgacatattttcttctataaaataaaccaaactttgtggccatgtgtccttgatcttcccttttatatggtgacgggggcattgccacagagcctgtaaatgtgtttcaaacattaattgattgacattagcagctttagtttcactggacaaaaagtcagaataattaatcaatcaattgagaagccaaggaaaaggagggaaattaacatttattaggccctggcaaggtgctaatggtgttgttgaaattgggatagaagcatgggccctgtctaactcatggggaggctgggagtatctaacgagctaatgcacatgaatgtgctttgaaaccaaataaagcactaactgctctttttaattgttgtgactagagcagagcttgggtcagagaggaacttcaggggaagggaagtgagagaagcaggtcaaggaaggggaagggactgaatgagcaggtagacaaaagcaaagttgagctttagcctgatccaaggggaactctggagaatgaattaaaccacaaagttgtccccagttgaggcaaggaggagagggagcatracctctagggcaaagcagcatccacctactgagggcactttgctggggaaggaggtccagcagtaagctcttagcagctacacaacagctggggtgagtaacctggccagctagtgggaatggggcaggccaccagcagcacctccaatgtgctagctatctcacaagtagaattggagtaactgttcccaggtcattgttttgttttggtttggttttgttttgctttgttttgagacagattcttgctctgtcaaccaggctggagtgcagtagcacaatcttggctcactgcaaacctccscctcctgggttccagcaattctcgttcctcagctgcctgtgtagctgggattacagggtcacaccaccacacccagctaagttttgtatttttagtagagatggggtttcaccatgttggccaggctggtctcgaactcctggcctcaagtgatcacctgcctcagcctcccaaagtgctgggattacagaagtgagccactgcacctgggccctaggtttaataaatcttttgttagcctgcatgttctagtgttcaggaagtagcaggctcttccctgggacaggagcaggcagccacgtgagggtgcagggggatcagtccgggtgcacacagacttctgtgtctggcctcrttatgtagacgcccattttactgcattttgctttcacgacatgccattgaggtaggtcatattatttccactttccaggtgaggaaactgaggctcagagaagttaagcaacctgcttcttccaagggcactaagttagtaagtggcagacccaggattcacacttggcagcctgagaccttcccatcatgacaccctaattccaagacattgaaggactttaagcagagaaatgacacaatcacttataaaggatmtmaaggtgactgggacagccacatgcagggaggctggcagacccctgttgaaaggctattgtgatggtcccaatgtgagacgagggggctggggcttcagggagggagaggaggaggggccagactgagccgcgggtaaggggcagaacggacaaagcatgctggggaggtgaggaggagtcaggaaggacatccaggtctcaggctccactctctgggtaggtagagctgtacttaataaggaggagcaggttagaagggagatccttctttctagtgggacaaagcagcctcatcattcatggtgtttaaatgttttcattggccagaacctttacctgaacaaggcagtgaatttcagcgatcaccttctgagcagtgctgccgagggtgatggggggctgtgcggcagcaggtccagctggggtgagttattcccttctggcaattttaaaacaactgaccaggaacacatggacttggcaggtatagcagagaactgctaagagtttgacagcccggtcacagatcttgcagttatgttccagacgttttatttctctggcttctctgaagtcagaggtgagacttttgaagtcctttacagggcttggggaaattcatttgtggggtgcacttttggacctaaaaamcgaagtccctcttttcctctccttcccacccttcctctggttcctggacaggagagtggctccaggagtctctcctgccgggtttaatcaaatagaaatttctatgatagccattttatcctctgacttttgagggacgtggaagtaagaaataactgtttgtgtggggagttgggggaggggcatcatttttttccccaactgtgtcatttcagtgagtgactacagccagagtacctcagatactattgaaaaaatcaaaaggataaagaatttcaagaccaaaacttttcaagaaaagaaggagcagcttatagtaagtgtctttttttggtccttgtggatgttgtcttcagcctgtgattttcaggttttattttgaccttttttaaaatggaagaataatttctcattttctgttccttttttatgaggtttctcatggcatccttgtcctttagacttctttaaagtatctcaagattatgaattagagttatttcaaagttcccatcagtttcctgaatcatctctgtgtttcctctggggtcagttctgtctgcctatctttcgactttggtttgcctcaaatatggaaccttggttgtctggtcgtttgacaaatgaagactagttgggtagtgcagatgctggcctggtgcccagcatgaggatggaccctgaagtccctgtgtgagtggacrggcatgtcgtggacagacgtccctggagggagtgtgggcagggagcaggagaaagccttcagatcccctgtgttgctggtggaaaaggtcttcctctggtggtgagggtgttggtgtgtgaagcgctctcacgggtttcagcttgggatgaagcttttttcctttccctctacaccctcccctgtgtctgtcatggaggtctaggctctgcccttctcctttcttgggccccagtgcaccaagtagaagcctttgttgggcaaatcttatgctttctgcgaaatagttatcagggcaaagtgcacaagcctcctgcccttcttacatggggaagaaggggtaaggcactagcgatctcagctattcaccacggagcccttaataatctactcatgcattcaggctacgcccaacacctaacctccatatggattaatttaagcttctgcagggctcccctggaaagaaaacactcctacctctggtatcttcagctggatttttgttggtttggtttggtttggtttggtttggtttccctgtcagatttcatctactttcagtcttcttggaatttctcaaaattactaattcaccgatggtcagtaccgttttagagtttcccayatctttagagttttgtgttttaaaaatatatgccaagaatagttctaaaaggagctttggagaaaagggcagtggatgccacctgctccatccccagccttgccttttaattggtcctccttggctgcaatacaaagaacagatgtgattagcagcaagtcccaaggcctgggcccgggtccgagctggacacttgcatgatgccgtgtgcttccctccatgtgtggttccaaggccaggccctcaacgccgccttgtcagtgcactagcygcccagcttgcctcctgattcctctggaggcagggactctgttctttatcttttttttcttcccaccacatgctttgtatgtaacaaacaccagtacatttggaaagaatatgttagaattgtttyaacttttgtattttaggatttcttgtactcaccaccttctcccagtttgaaatattgttattgggtataaaagcatagagttccataaactgaacagcttacaatttgggagactctacctatttactctgtgtataacctgaatcttccactgtatatggcttttttttctcatttgcacttaggggataagtatcagaagctgtaacatttgttcactcattcagtgattatttttgagcacacrtgtaccaggcactgttctacgtgttgaaaataaaacctaaacaaaagacgtaaaggtctcacacctcctgaagctgacatgcctactgcattctagtacacatttccatgaggaatggaaatcagtgtaaacaagtgctccccaagacccctgctgggggtttactgattagagtacttggttctaagctattcatcagtaagatggggacagcgagaaaggaggcagcaccgcctggaccaggcatcatcttctgaaaggctcagaggccttgaccagtgtcctcatggccatggcttcacaggagcaaggacagggaaggtattatttccactttacaaatggaaatggtggtcctgtgaccaccccacagccatgcccgggatccagaggcagaaacatactaaaagcaatgtctcttgctttctaaacagcttccttcagtctttcagcatttgaaattctttatatataaagatgaatttatggcatttaaaaatataaaaagataagttactcagccaggcccagtgactcacgcctgtaatcccagcacttagggaggstgaggcaggcagatcatgaggtcaggtgatcgagaccatcctggctaacatggtgaaaccccatctctattaaaaatacaaaaaattagccaggcatagtggcatgtgcctgtagtcccagctactcaggaggctgagacaggagaattgctgaaacctatgagacggaggttgcagtgagccaggatcgtgccactgcattccagcctgggtgacagagcaagactccatctcagagaaaaaaaaaagatcttgaaattgctgagagctttttctttgttttgttttgttttttgagacagagtcccactgtgttgcccaggctggagtgtagttgtatgatctccgctcactgcaacctctgcttcctggattcaagcgattctcctgccttagcctcccaagtagctgggattataggcagctaacacgtggctaatttttatattttcagtagagacacggtttcaccatgttggctaggctggtctcaaactcctgacctcaaatgatctgcatgccttggcctcccaaagtgctgggattacaggtgtgagctactatgcccctccttttttttctaaagaagaagtcaatttattggctcattcgttcctcaggggagtatattttctgaactgtcatacttyggctgaccttgaacactttataaagtatgcaaaataaattttaggattcacctgattgcttttcctagagctctagtcataataaaactagtgtggagtttctgggttttgtgaggtttctcatggcatccttgtccttaatataaaatagtgtccatgcggtaaccttgcctgaagcaaggttttggagcagcaagattgatattagatgtggatatttgtgctgtgggctrttaaagaccactcacacactcacacatgcacacactcatagtcacctgtccttgtgacttagaattcaatgttggaaagaaagtgtttgccttgagtgaatattttgaagtgggggaaatgaccacattctgtaatcctgcagcctgaaaacagactcctgctgaaggaagtcggacccacgggggaaggaagagtctctgtgattgaacagctgctggatgaggtaagtgttgccaaaggagccagtctctctgaagagttcagcctggcattccacctctgtctccttcagatgaaagttttgttcaatactgtgaaaattacactgccctttgattaaaaacccgggatatagtgaatggctagtcaaaagctttatattaattgttccctgttgctagtttttatatcagagaaaataggcagagaagcacagatgagaccaaggaacatgcatgaagctggatagaatctctggcccatgaccccatattacctttatcctgggtttcctaaagaagcaaggttgtcagggtgcctgccctcccctccccgcccatgtggggaacagaagttttgtcacctgggtaactttgtagctctgttcatcgtagrtcaggtcttgaggttcctgattctcctctcctttgatctgaaagcactttagttgcatcagctctgtaaaggacatctgttatacttcataggatggcgactggatgctgttgagtgcagggtgttttggagagtttgtccttttccgtttgctgcagggagcagaccccaactgctgtgatgaagacaatcgacccgtcataaccgtggctgttatgaataagcaccatgaagcgattccagttctcgtgcagagaggagcagacatcgaccagcagtgggggccgtaagtgaaacacattgaaaggagagctaaggtagcagcaggctgactgcttggagctccactgcagcagaagcggtctacacacacaccctgttcagtttcagccactttaaccattttaacctatttcagctttaataagaggcttaacgccttctgttttccatagctgggtaaagcgaaattttaaaaatggactgttggattgcctaatttagtggcttttataaatgatgatacattttgttaattcataaacttatactgtgtggggccagtaaatccttagcccttggggtgttaatcaatgttttcatcatgaatcgtgaaaacaccaagggaagacagacctyagtgtattccccatgaaaatatccccatgaagttaatgcagaaagaaaatatcatacggttgtctccagatctcacaccactgcagaggagactggtacatctgaggtcaccacatggtctcctgctgccttgctttcccacccgtgatacaaaacagaaaggtaccaagtcctgttacttaccctcccagtcttggtccactcctgtccaataaccttctcttctagctgtgtgcttctgttgttctttcaaaaagtactttgaaaatatggggtgaaaattccttgagcatgagtcattcatgttaacttctcatatcttgccgactacgttgttgaaatgagtcttctagggacatcacaggcatctaacactcctacctcctgaagtcttactaaggcgaggtcaaggtccgtgtcagtggaacattctgctgtgtacttcatgctaccacggaggccaaaatttcagtagctttgcttctgttattctctgtttcaaaactgtctctagtgttagtgttcaaaatataatcctgttaatttttctatatgcattttactaatgtctgcattttaatagcttctaccccccttttgttagttttattttacagcagaatgtttggtgtgttggtgtaaagcttcgatgcttggaatttattttctcaagttttcttagagtttactgtgtcaacttatttatttatcccacactgttgtattattgtcattattaataaaatggtgctgccttgttttgtgttaaggcatattttatatttttataattcagaaaagctttttaaatagcatttaagtatgtttgtggttgatacagaaattacttgagcgcattttgaattgaagtgtaagcagcgtgagtcctggctttatgaagagtccagctaagaggaggaaagtgccctgggcattgaacagattgcctttttattttgctgtgcctcagcttccatgtttgcttcaccaccattctgtaaattggcatttatccacatgtgatctcattgcatgtctgtaaagtctgacactgcggttatacctgtctatctgaatggtgtgtaatagcctttgtcacccccctgcaggatcatggtgactgtgggcagtatgtagctcacatggttgtggggaggaaagctagagggttggccctctctcacgtagagcacagggatctcttcttcctttccagtgcatgccagtagaggaaagtagcatttcccactgagagccacattctgccaagtctggtttatatctgttagtttcaagagtttgggcctggatcagcccagcctctgccccatagctggacctctgtagacccaggaacatggcctcaaagttccatccatcctattgcttttaggcataagtcatccagagatctggttttactgtaaaagaggctcagcgagttgttccttagcaaacaagaattaaaatgctgtctcccatctgagcatgtttggctagtggagcctaggtggtctcttcaccaggtaacttccattaagtagcttggcaggtggcagaaaactctttcctaatttcctagttccatgtttgtatcattcctaccagaatgaactcatattcaacaaaagggaatggccargagaaattcacatcctccaccaaagctcattcctcttactagcaratttcagaaacacaggctcaggatctcactaggtgagaggcccagagaaatgctgtttgcttttggacaagagctgcccttcctcactgcattggcgattccaaacatgccatcctctggctctgccccagtagccaggtgaggaagatgcaagcatcagtctacttcttagaggttcagctgtggacatttattccattaggtaatttaaggagagaatgtacattaatctaccatgatacttagatttgagtaaatagtttgaattgtttgtatatgaatagtaaagtttctttaaaatacaaattccatggcagagtcaccattcagcattttccaaaactgaactgtggatacataggaaatagccagcacagaaaatctaaccaccagcaaaccccccatgcaatacatagaatgaaccctctgctctcaatatggggagaattgtgaagaaagaagatcttaagtctacttaggagatgcggcaaccctatgaatatatcccagttcaaatggtgaatgctttataaaggcccaaggaaccataggggtgaagtgacagagagttaagctctatgccaccagtgaggaagaaaggatgaaagataaggaggaaatcagtcttttccagactaattccagttaaacctctttcttttgtaaactgcccaatcttgggtatgtctttatcagcagtgtgaaaatggactaatacactggcacacagcatagcccatgaacattctatggcaaattcttcatttgtgacctgttttttctgaaagcatttatccttgatgttctgaaattccacaagggtatttttagatgtgctgtttttgattcacccagttggccttttcaatttaaaaagtcttatctttctttaggttaggaaaaatttgttctattatctctttggcattttctcccctccatttttctrttctctttctagaactgttagttggacagtggatggcttgaattaactccatatgtctgtctttcttttctgtttttccatagtttcatctatttttttctcttctatctttcgagagattttcctaactttgttgtccattcttcctattgaataatcgttattctttctaggagctgcttttgttctgattgtttctttttcatagtctcatacttttgtgcaatattatcttgactcattctgcagataccagttagatttttgtcttgttttaaattccttgtgtttgtgtatcgtggttttctctttgattctacaggtttttctcagatgtctgtgaacctttgttgtccattcacatttgagaatggagtttgggctacatgactggtaactctgtgtataagagaacggctttgtcaaccaggaggctttctgggtagatggagctactcccaggctaggacccctgggtcccagaaagtgaaaagcttccctctgattctcaccagcggttctctttatcttcatcagagaggaagycactctcctttttctccatagggatcaatgcatggctgcaggcacatctgcaggtgtggaggatgagggtgatggcgtcaaaggaaggagcaggggcagagagagttcagaccgtcaatgcctattcatttctacttccagtcatkactcctgccctccttcactcctgccacctctgcataggagyctttcaggagtcctggcgccactccagcctccatttcagttgcccactcctccctcactaggtcaaacctgaccaggaaatacggagagaaaccctggcattgcagcaaaatatgctgtgtctgacctctcaggcctgccccctggtttctaagattggtgtttattttcatatcatgtaagcccaactcactggagccaaggtcattttccccacacaaaaataggagcttcagccctgagaagctactatcgtgcccaagaggtccaagccaaagttaagactgtgtcctcccagcactttgggaggccaaggcaggtggagcacgaggttaggagaccgataccatcctggctaacacagtgaaaccccgtctctattaaaaatacaaaaaaattagccaggcatggtggcatgtgcctgtaatcccagctacttgggaggctgacgcaggagaatcgcttgaacctgggagtcggaggttgcagtgagccgagatcacaccactgcactccaccatgggtgacagagcaagactccgtctcaaaaaaaaaaagactatgtccaatatgttgcataaactcttgcaggcaatttagaacaatggtatttattagcatttattaaatcaactaccaaccatatccttgtgggtttctcacattaaaaaatgaatgtgtttataacctttgcactatctagtatcaaagcttaccctccatcacagtattcctccaagagaaaggcagagagaggagactcaagaggtttcccaggttagttaagtaggtcggtgagcaaaaccaggaccttgggtcacatgcatcctctccagtttcctgatgatgctaactaaggatttatccaggatttttcccccctcattaggctcagaaatacagctcttcatgaagcaactctgcttggccttgcaggaagagagagcaccgccactttactggggtatgtcccctggcctctgatggatacttttgagggccacagggatctccctaatggcctgtgatgattttaagaggggccttggttcctgaactgctgtccctgtccatggggaccaccatcccaccatggcttccggggcactgagggcttttcaaagcgcaatgaaaatgttgcccccattaaacacactcagttgtaggactttaatgcaatgggaaccaatggccaggatttgcaattggacattttgaaatcacagagcctctttaaaggtttcagggtagagccacctctgagaactgaagtcactgtgacctcttggggagaggtttggggaggtggraccaggaggggcccagcctggcctccatggcagggtagagtcaagctcttagggtcacatgttcaagtccttcagtgcacctccgtttctccatttcctttgcagatgcaatgcaagcatccaaaagaagaatgcaggaggccagacagcatacgacctggctctgaacactggagatgaccttgtcacctcactctttgctgccaagtttggccaagggcttgaggaccaactcgctcaaactaggagcctcagcctggatgactgttagccctgaggcctccacgggacttcatttaagaatacgtgcatggctggcacagtggcttacgcctgtaatcccagcactytgggaggctgaggctggcgtatcacctgaggtygggagttcaagaccagcctgaccaacatggagaaaccccgtctctactaaaaatacaaaattagtcgggcgtagtggtgcatgcctgtaatcccagttactcgagaggctgaggcaggaaaatcgcttgaacccgggaggcagaggttacagtgagccaagatcgcgccatcgcactccagcctgggcaacaagagcaaaactccatctcaaaaaaaaaaaagaatatgtgcagctctggctattctttaatcatgtctttctgaaatgtgtatttgagattagaaattgaggttgagaggaactcaggagattttttttttaaatcatatgacagtataagccatcagtactaaatggacagctcccagtatactgtggactgtgataaactgaatgtatgttttttaatggtttattgctgcaggttttttgtgtatttgatttttagtttttaacttatttttcaataggtaataattgcacatggttcaaagctaaaaggtatgaagtattatgtagggatacgtccctcccattctgtcccacagccaccacctctctcctcagccagcaatgacatcagcgtcgacttgcctttcccggggttgtgcagagttagatatgcacatacatgtggtataagcacatgtacagaggagtacacatagcatataaacatgtctgtagcacatatatattctttcccctcttttaaaacaaatggtagcaaaccaaccacacactgttctgtatcttgctctgtttgcttgatacatcttgtaagtggctcctaattactatgtaaagattgaccttatttaaatttttttatgttgaaatcatcaatattcccatcattatggtgtgttctttgattgacaaatcagctctcaataaaccacttataagaatgtgtaattttgactcattcctttcttcacgtcattattttaatctttgggtggtaatgctgcagttctgaagtccctaactagtttgtgttaacataagtaatagaatatttattaatttgctataattaattcagcacaataagtaatgggccttgttgaggtggttactgttatcaccacctgctgggtggtgatacttccctagactgggcagctgtctgtgggaggacagagggtgcaaagtcgcgggaacacaggcccctgggcaggcaccgccactgctcctacccctatcagcccctcagccactcgtgtaagggaggctgctgcatggtggccagtgtccagggagactggggagtgtgatcatctggtttggggcctgtggtggtttgccctgtgtcagcttggctgggactactttgcccagaattctcttcccttatggttctcttcagggttggccccaagaaaaactgcatgagattcagaagatagaagaaaagcaacagcagtcatgcttggatggtggctatagggcaccaggtgcctctgccactcacatcctgtgtgaaggaagggatggaagtgcttgccaccgccaagcagcaaaccctgcctttgggatggaagaggatggatgtttattgggatcaacacttgtgaaaagatgtgcagagggagaagtctagtggggggtaatggggttcaaggccattttccccagacctcagggagcagggagggcctcatggacccgtgggttctagaaacaattgccttggggttcttggtggggaacttttgtgccctgagtgcaggaaccacgcttttaacgcctcttaggttttccacactccctcttggaggattctaccttctgaaaccaagaggcccttccagtgccggctggccagactcagggatctgtaaatcacgcatctgatgtctcatgctagggtcctttcctttctctaaagctcacagcctacattcatcacccttgaatttcactctttcagaatcaaacctccgttaaaataggactaaaaagtgaaaaggcagcctaatatttaacgctttctgatgaaatcctacagggtcacataaaatgttctattaatattaaagtacatattttcaggaaaattaaacacattttaaggcagaacatttctgatgtgaaaaatcatgttgttttttgtcctttctaaagctttctttttcttttcctaatgacagggcttgttgagggaacagagccactttaagtgaaagggaatgagatttttaaaacttttttattttttagagacagggtatctatctctctgtcacccaggctggaatgtaatggtgtgatcatggctcactgcagcatcaaactcctgggctcacgcgatactcacctcagcctctagagtatctgggaattacaggcacaaaccactgccctcagctaatttattttattaaaaactttttttttttttttgtagagacagggtctccctatgtaggctggtctcgaacttctgggctcaagtgatcctcccacctcagcctcccaaagtgctggggttataggagtgagccaccacgcccagcctggaacaaggaatttattaaaggagttagactctcttcagtgcttgagctggttagtttgatggtgggcctgaagatgctgtaccacagcagggctacattcaggaagtacaggtgagcatgaaggggacgagcaaggacaagctggaacccatggggacacatctccctcctccaccctcatggtcacaggcaaattgcaggagatgcgccctttcccatgaaatttgccccaggctgggctctctagaagcagatgccaagacagtttgggatggaagaggatgggtgtttattgggattaacacttgtgaaaagatggtggagagggcagtcaactgctatgtggcccaagaatgcctcagccaccaggtggtgctcccatcagccagaattgcccatcatggtgtccactgtgcttttgtagccccctggcagatgggagcttccccagaagggacgggacctcaggcaaggcagctctctgaagttgctgatagctggaggccacctgctgccgcactcgctacagccagggcagcaagccctgcctggaaagaggatgtgggtggtgcatctccgcctgccataaagctgcctaggtgcctgacccaggctgcaggacagctgaaggcagagatcggggggagctggtgaagccacgggcctggctgcttcccacacctgccagatgagccaggggttagtgactgtgtcttccctggatctggtcctaaggccatgtcctctcaaggcctggtcgctcttcctggaggggctgtctctgctttgcggacttgtcctatgtccccagtgggcttcagtgggctggcttgccattccctcctttccactgaggtgagtgagttcccatgcactcattgcccatttgggtttcttctatttttcttatcggcttagagaatttctttacatcctcttgaatcagagcatcttctagagtccagacagtgctgtccaatagaaatacaatctgagccacatatacaatcataaattttctagtagccatacttctaaaagtgcagagaaacaagcaaaattaattttactgggatacatggacagatacttttccaaagaagacatacttgtggccagaaagcatatgaaaaaaagaaaaagctcggtgtcactaatcattagagaaatggaaatcaaaaccacaatgagataccatctaacaccaatcagaatggctatttttaaaaagtcaaaaaataacatgctggcaaggttgtggaaaaaaggggatgcttataccctgttggtgggagtgtttaaccattgtggaaaacagtatggtgattcctgaaagagctaaaaatagaaataccattcaacccagcaatctcattattgggtatacacccaaaggaatataaatcattctaccataaagacccatgcatgtgtatgttcattgcagcactattcacaatagaaaagacatggaaacaacctaaatgcccatcaatgacagattggataaagaaaatgtggtacatatacaccatgaaatagactatgcagccataagaaagaacaagaacatgtctgttgtgggaacacggatggagctagaggccattatccttagcaaacaaacacaggaacagaaaaccaaatatcacatgttctcacttatacgtgggagctggccaggcacagtggttcacgcctgtaatcccagcactttgggaggccaaggtaggcagatcacctgaggtcaggagttggagactagcctggtcaacatagtgaaacttcatctctactgaaaatacaaaaattagcccggcctggtagtgggcgcctgtagtcccagctactcgggaggctgaggcagaattgcttgaacccaggaggcagaggttgcagtgagccaagatcttgccgttgcactccagcctgggcgacgagagtgaaactccatgtccaaaaaaaaaaaaaaaaaaaaagtgggagctaaatgatgagaacaaatggacacaaaaagagggacaacaccggccaggcgcggtggctcacgcctgtaatcccagcactttgggaggccgaggcgggcagatcacgaagtcaggagatcgagaccatcctggctaacatggtgaaaccccgtccctactaaaaaaatacaaaaaattagctgggcgtggtggcgggcacctgtagtcccagctactcgggaggctgaggcaggagaatggcatgaacctgggaggcagagcttgcagtgagatgagatccccactgcactccagcctgggcgacagagtgagactctgtctcaaaaaaaaaaaaaaacaggtggggggacaacacccactggggcctctcagaaggtggaggctgggaggagggagaggatcagaaaaaataacgattgggtactaggcttagtacctgggtaacaaaataatctgtacaataaacccccatgatatgagtttacctatataacaaaccctgaaccgaaaataaaagttttaaaaatattttactagaataaatattatttcaatttataattcatctaaattgttaatgcaatattctatatattttatgttattttttcacaccaagtcattgaaatctggtgtgcattttatccttacagcacatcttaattcaattcaccacattttaaatgccccctacctgcacatgggggttggctacagcatagttctagaacctactacctatgtaataacacacatcgaggtcattgcattctgattcccaccccgctaggatactagcagcgcagatacgctcacttgaagcttgcatctctgtggttggtgggttttccatgtttaatccagaagagttcctccccaacacctgtgcaaggccgcagctccaggtgctctggtcaaggtgcccagtaggataaagaaaatttacagggtcatttatttctgttgtctccaagacatctcttcagaggtcctcaagaacgcacatcacttgcttcttttcccacttctatttctgactgcttcggagccaggtttttgctttttcctggccaaacagaaaataaagagcatctcttggattctcatccaccttcccgttcttcaagtaattgcaaacccagcctccctttgtggttttctaagggtacggtcttgtggggacatagaacaggcaaggtaaagtgactcattctctactctcccctccttttcattgtaaatcccaaaaagagagacaaaaggccacatatacctttgtccctcaatgaacaggaaatgaagtgtgttaccttctcaattgcacacacggatgcagttaactgctgtgtgtttttctgaatggaaggaagaggggcctgggcccacagagccatctgggagccgcttctgtgatggagaagagtgcccaggtggctgctgcttctgcctctcctcgctgctgcttctggtcctgctgctggaggccagatctgggtgaactgagtgctgggaattcaacccggaatctagatttagactgctaagtatgtccacagagttcccaaaatacatcagcacctgcttctggaaggcagagcatttggacattccgtgggaacgctcctgagatgtcttggttcttacttgaattgccaacaaaaacacagttccatctctcacctcttccctctccttcccccatctccttcttcatcccctctccctcaactggtttttctacccatttcccccaaatccttacctgaccccaaaaactccctctatatgcaatccctttccttctgccaggcccctgctttcctgtccacatcgtctcttggcctttctttctctcttgtgaagtgatggaaatgcatggtattatttacctaaattaattgactcaaaatttccctttcactttcaatgaaccctactcttttaatgaaatagtgacattttctgtttacctagactacataaattttacttgttgtatttctgttagtaaggatataaatcccctagctttaatagaacgttgtaattataaataaaatactagttatttttaaatctttacgcataaaactagaataaaatttttatagtgaaaattaagaataacattttgaatattatacaaaaagtggaagtcctatttctgtggctctcataatccccagcagtaaccactgttagtggatgtgctggccgggcgcggtggctcacgtctgtaatcctagcactttgggaggctgaggcaggcggattgcatgagcccaggagtttgagaccagcctggacaacatgtcaaaaccccgtctctaaaataaaaaacagcgtatgtgcaggctttggaaacctttatctttctctgcaatttaacaccatataaaata

SEQ ID NO: 97679 - DNA, 128590 bp, Homo sapiens
ccattaactctttaagtttcccaaggcttggtcctaggccttcttttcttctcattctgtatatgctccttgggtgattttatcaactctcatggcttaactatctagatcctgatgatgcccaactctttagtccttggccagtattttcctcttcaggtgatacccacgtaattatctttaccacatctctatttggatgttacttgggcacatgttaaaaaaaggtggctgggcacagtagctcacgcctgtaatcccagcactttgggaggctgaggtgggaagatcacttgcgttcaggaatttgagacctgcctgcactcaatggagtacaatggcgcaatctcggctcactgcaacctccacctcccgggttcaggcgattctcctgcctcagcctcctgagtagctgggattacaggcatatgccaccacacccggctaatttttttttcttattgttttttttttttttctttttttgagacagagtctcactctgtcgcccaggctggagtgcagttgcgcgatcttggctcaccgcaagctccgcctcctgggttcacaccttctcctgcctcagcctcttgagtaactgggactacaggcgcccgccaccatgcctggctagttttttgtatttttagtagagatggggtttcaccatgttagccaggatggtctcgatctcctgacctcatgatccgcccgcctcagcctcccaaagtgctgggattacaggcgtgagccactgcgcctggcctaattttttgtatttttagtggagatgcggttttgtcatgttggccaggctggtcttgaactcctggcctcaaatgatctgcccaccttggcctcccaaagttctgggatgacaggtgtgagccacgacatgtgacctctacggataattttaaaaattagttgggcatggtcatgtgcacctgtggtcccaggtacttgggaggctaaggcaggaggatcacctaagccttggagattgaggctacagtgagctgcgattgtgccactgcactccagcctgggtgacagagcgagaccctatcttaaaaaaacaaaaaccaaaaaacaaaagcaaaagctaaactctgcatcttccttttgccagtttgctatgcctcctatagcccacctctcggtaaatagggctactccttaacaagttgccaaaggagaaacccagatactattccaattcctccctctctctctgcagggaagcaaaaaactcctggcagtctgtcctagaattgtttgaaacacatcactcacctctagctgtcctgccattatcccagtctataccatcattgtctctcacttgaccttccataatagcttcctaacacatctctcagcctctaatgttaaactctttctttttttttttttttttgagacagagtctcactctgtcacccaggctagagtgcagtggcacaaccacagctcactgtagcctcaatctccagggcttaggtgatcctcctgccttagcctcccaagtacctgggaccacaggtgcacacgacctcgctctcaggctcaagtgatcctcttgcctcagtctcccaagtacctaggagtacaggcacatgccaccatgcccagctaattaaaaaaaatttttttttgtagagatggggcctccctatcttgccagggctggttttgaactcttagcctcaagcgatcctcctgcctgggccacccaaagtgttgggattacaggcatgagccatcacacccagcctactcttaaactttctgaatctagtttccatcccataatcagagggtctttctgaaacataaatctggtcagattattcccttgtttaaaattcttctttggctttccactgcccttggaataaagactaatccccttgatgttgcttagaaaacgctacatagtatctttgcttttctagttacataactggctactttcctccctgttctctatgctcctgcaatttaacgtgtgtcttgctttctttgctcttgcacatgctgctctctcttgcctggcactgtttcatctaatttccttggctcattcctactcctttaggtccccactcagccatcatcactttctctaggaagtctcaacctcaggtctatggtaagcagctgattgtgaagctcataaagcacccaaattcctttatttctcatctcacgctatgaaataatagcttgtctaatgattaactttctctcctttgaggtcactagattgttgtgtccccagcccctagcacaattcctggaagagagtaagtacttagtaagcaatattttgcacaatgaaagaatgagtactcgccaagcaatcatttgatattgtttcagtactctcaagttggcagacaatgcactgatcagccaacttgagcattctaggccacttaaattttattttttcacttgtatacagcctccctgctgttaagaggatgtaaaaagcactacatctggtataatagaacatattcatatagttttttgacaggttcgatcttctatcttttcttcatttcctaagaaacacccattagcattgttgctgaagaaactatcctgtggccagtcaccccaaactgctgctctctagatgtttacttcctacttgctatatcctttataaggaactccttcctctcctggttcatggcctgctagtcctgcaatacttggctctttccctaggtccccacagtatcccagatactcctattgtttatcacttattgcagtacaataaaggagctttcagtgagcattttactgtaagcctatgtcagtgcctaacatagaaagagatggcaagacttaagttctgaattttcagccccatcagttactagttcggtaaccatatcaccgacagtgcaagtcgctacatctcttcaagagtaattttcttgcccaggtgcagcggttcgtgcctgtagtcccaacactttgggaggctgaggtgggaggatagcttgagtttaagagttcaagaccagcctgggcaacatggtgaaaccctgtctctacaaaaaatacaaaaattagctggcatgggggcacgatctgttgttgcagctactcggagggctgagatggaagaatcacttcagcgtgggaggtcgaggctgctgtgagttgtgattgcaccactgcactccagcctgggtgacagagcgagaccctgtctcgaacattcctttatctctgcatgggagtgataatatcacaaggagcagagagaggttttaggttaagtttgactactcttcgtggcagagaaaaataagctgaatacttaaaataattgaaaacattaactttctcctctataaatccttttgatagttctctaatattcatggctgccaaaatcgaggttttttttttttttttttttttttttgatggagtcttgctctgtcgcccaggctggagtgcaatggcacgatctcagctcactgcaacctccgtcttccgggttcaagcgattctcctgcctcaacttcctgagtagctgggattacagtcgcccgccaccacacccggctaatttttgtatttttagtagagaaggggttttaccatgttggtcaggctggtctcgaactcctgacctcaggtgatccacccaccttggcctcccaaagtgcagggattacaggcaggagctacagcgcctggcccgtaggctactttttatcgaacttttaatcaaagattcacgttacaactcctagttggctgaggattactctatctgttcttttccaggtcacttcagaagtttctccaaatgaatcagaaaatacatagtgtctgtttctgaaataaaagtacatggaaagagagattcttctccttgatggaaaaggacaaaatactttcttaaggttctcaatgactcattgtgatgggaggggaagaggaggcaaaggaaaaaagccaatttcagtaaaagatttcaagaagttggtaagaaaaatatagggtggaaactttgttttcctgctactaaaaaaagatactagaacagaacaaggatcgcagcaagaaatatgagtgaggccagaccatctgccaaacccttcaaactcatcctttctaccttccccattaaatagcatatttaaaaatgaatctttgctgactctgccaagaatcttaaaactgcccaagtttctttactagaactcacggaaacctggtgaatactaatattacctaaaagctcagcaatatagaggaaattctcagactggatgtaatgaataagaacggcactgttgtttcttgcagactgtttcttgcctgcggtaaatcttgccacatactctaaatccttggtaggccatgaacaggggaaagactataaacagagttggagattacaggcctcaggcatgcaactcctgtagctttaccatttctccttaggttggcttcagagaggactcaatcccccaagtgcagagatgagggtgtgtagcactagaagagctgattttggggtgggaacttagacttcttgtcttacctggctcccactttctatcacccgttttaaagatgtttggtaccttgaacatacatggaacatactggtagctttaactgtgtgcccttatctaccctatctatgtagatgtgccctatctatgtaaactgtaacttagctgagaaaaagtttaactcaaagttttggcaagaaaggggacagccagtccatggaaaatacaaagagccacacttagggaaaatagcttagcaaatggctgcctttggtgaaaatctagagtccacctctagaaggaaattcaaagttcatacactgaccctcgcccctcgcgtcccccctcccccttacctcagatcaccacggatagtgaagtagggtgggggaagggagcaatggcaaagtggacgctcacggcaggggacagagtaaccaaaaagagtagtttctgggggagagagagaaggctggtgcagaggtaaaaaggaaagacggtgggcggatggagagatgagggcaagagagtgacagcagggagcgggcagagctggagaaggagagtgggcgagagccagaaaagaggaggcttaggagtaaaagggtagagggccaagggtaacagcccagggttggatccgggaccagggaggttatgaagtgagggctgggcatgggacagggccgcacaggtcgggtaggaggtctggccaaaaaggggttgggccaagaaggtggtcccgcccgaggatggctcagggagcggacggaaaggatccaattcctagcttcatggtgccttggcaccaccctcactcgcctgcaggatccgggctcgcactgccgccgccgccaatagcgccgccatggctctcggccgccctagctccgcaccccgcgcctctactgcccagaagcactacagctgccaggcctcgccctccatcctgccaggcttcctcattggtggggaggactattttctccagccaatcactggtccgaacacctgattcctctcctcacacccccgtcctggggataagtgattggttaggagcgaaaatgctctcgccctctgccacctcagccaatgacgtaggcggaggtagagaagacgcccctgacttggacactccctaccgagcacacggggaagacgcccccctaacctggaactccgattggccaagggcggaaccgaggccccacccccccactgaaaaaagtaaataagacccttcaagaattttgcagtcgctccacctcaacatccgcgtaaggggcgtggctatacttaggggcggggctaggcaaagattgccctatgaggcgagggaatgagactgggctgcgagttggggatagggtttctctttgggggcgtggcttatggaacctcgttttcccgccgacggttggccacgtcacgtgacatgggttggaagatggcgtctcccacagacggtaagagccggcttagagatctttkcctgcagcctccttctttgctctactgggaacatccactctgtctctgcccctcgaacatacatttctttcttgggctcttctcctttcccttttattttttttcttgagatccatcgccgtcttcagctcaccggttcttcacagcagctccggaggtgcccagtttccccgctctgtaccaggcgtgtggaggagggcactagggagggactcattctgggtaaaaggacaggggggtcgccctgtsccttcyttatctctatttgggcgaggctgagggtcgaggaggagatgtttctggaggacgtggcttactgtagttttytccttggggtacccattgaaaggatcagttctcttctgattgagcgcacggatggaatgattctcacaaaccctcgcagggctgctggctgacctcatctcgatactgaaccgcaagagaaacatgatctctctcctgtctcctcagtttgggaccrttgccgtggcagcaagagaagcgggggacgttctcggcccctcgccctgagagtcgcgaggagaatcagtattgagcttttaagtgtcgtcttgcacaggtcgcaacctgtcttccatctgctttacgtgttgtttcttaaggctgagtgaattaacgatttctgtttatatattgtgtaaaatgcaagtcatttcaagtaacaatyaagttgttttggtatactcccatgcttttsctcttggttctgctttagagagttagggtcttgcagtcatttttaaactcatttttagttctaccatcctcatcccaactatatatcgattttattgatatataggtttccttcccttagacaaaaacattttatatttggaaggartcttggaagttcattgcaggaatgaagaaattgaagccaaggtgagctatattaagtacctgctacatgaaaggcataatgctaggtgctttgggagaccaaaagatgactcaaacatataaacatttttttttttcagtttcagttctctttttagatgtcacctcccaaagagtctttcttagaacacagtatctggagttgccctttcccaccattattcattatctcagtatcttccttgtcagcatagttactctgttaactttgccccttttgcgctagattgtaaattccaagtttgtcttgttcatagttggatccaggtttagcacagtgcctgacgaacagtaggtctttaattaacatttattgaaagattgattagatatatgcagaaataatatattacttgatcttaagttttaagtttaaccgagtcttaaattttgtgagcgcaggtacatactgtattagaaattatggctgggcgtggtggttcacacttctaatcccagcactttgggaggctgaggcaggcagatcgcctgagctcaggaattgaagaccagcctagacaacatggtgaaaccccatctctacaaaaaaatacaaaaattatctgggtgtgatgccacaaacctgtagtcccagctacttgggggggctgaggcaagagaatctcttgagcccagggggtggaggcggcagtgaaccatgttcatgccactgcactccagtctgtgtgacaaagcgagaccccgtctcagaaaaaaaagaaggaaaaaaaaagaaattatggatgtttggagtcaaaagagattctcctgcctgggtgcgctcttgcaaaaatgtccttctcttgccagaaagaagggcatttaaaaagtcaggcaagggaatagggagttattgttaatgggtaccaaatttcagtttgggaaggtgaaagaattctggaaatgaatgtgatgattgcacaattaatgtacttaataccactgaaatgtatacttaaaagttattaaaatggtaaaatttatgtatatttcaccacagttgaaaaaaaaagccaagtaatacaagtagaagtaattgttattaaactttttagtttatttttamattgtttttacaaactttggggattttagagatgtgttccttgagtttgatttttttcccctgtcatctctcaatttagtttcctttctttggccaggaagagtattaaaaacattaaatttggcttggcgtggtggctcacgcctgtaatcccagcactttgggagggcgagatgggtggatcacgaggtcaggagatcgagaccatcctggctaacacagtgaaaccctgtctctactaaaaaatacaaaaaattagccaggcgtggtggtgggtgcctgtagtcccagctactcaggaggctgaggcaggagaatggcgtgaacccgggaggcagagcttgcagtgagccgagatcacgccactgcactccagcctgggacagagcgagactccattgcaaaaaaaaaaaaaaaaaaaaaaattaaatttttttccttttctagccatctctatggtcactttatttgcactcttgatttttaagttttcattctcatctcttacaaagtttcactcctctccacctaatgttttctttttaatctgaaaaaatcaagtcaagcactttgaacttaaattcagcttctaaataagtatctcattccaaaatattccacggcctagctctttcacttctatttttagtgttccacctgtcactgtctttaaaatttaattcagataatatttattttaatatgtttgtcatttactcttttgtctttttcgtgataaatttgctggagcgtctttgaaaaggagaaaactgaaattcaaatacagccatctaattacttaatttatgagagtaagactcacagcagagtctgagttctatcccagactgtggtatcataaggtcacccatgtaggttattagattgtacccccaataatttttttttaactttcttttagagacagggtctctctcactctattgcccatgctgaaatgcagtgatatgattatagctcactgcaccctcaaaggctcaagcgattctcccatctcagcctcctaagtagctggtactataggctcacaccaccatgcccagctaatttattattattattatttattttgttttgagacggagtctcactctgtcacccaggctggagtgctgtggcatgatctcgggtcactgcaacctccgcctcctgggttcaagtaattctcatgcatcagcctctccagtagctgggataacaggcacacgccaccacacctggctaatttttgtattttgagtagagacggggtttcaccatgttgcccaggctagtcttgaactcctgacctcaggtgatgcactcacctcggcctcccaaagtgctaggattacaggcgtgagccaccatgcccccaccttattattttttgtagagatggagtctcactatgttgcccaggatggtctcaaactcctgggctcaagcaatcttcctgcctcggcttcccaaagcactgggattccagacatgagccactgtacctggcccaataactttacttttgttatggttgaacattcctcagaaatcggtaacaaagagaagctaatttttggatgctttaattaaggcaatgtattagttgagttctttacaattaaaatgccattggaaattcctttggaatatttggcaaaacaaattcagtttagagaaaagtacattttgtacgtatgtatattttctggggagtgagttcattttatttcccagatttccagagatgtggttacccagaaaatgttaagaactgctgtttatagcattaaatgaactagttatgcaactggttagcatactgagcatacaataaaaactcaacaaatgttaatattgagtactactgtgtgcaagggaagagtggaagagaaatgatgtcaaagaattaggtagaggctgagtaagattttatagagtgtggtagatacacattcacagatttagctgggaggaactttaagctggagagagacacgaactgattgacgtttaaaaaaatcaattctggcctctttatggagaatagattccgggggtgtgaaggggaaagggtaagaatgggagcagagagatctgttaagaggctgttgaagtagtccaagaaagaagtgatggttccttgggttatttgatttcagggtgtattctgaaggtagaaacgactagatttactcatggattggttatggaagggtgaaggaaaagaatgcatgaaggatgacatctgggtttttgatctgagaattggaatttatggtagtgttatttcttgagatgggagaagattgggggaatatggttttgaagataattaggtttaaagtttaagtggggattttttttttttttttgagacaggatgtggctctatcacccaggctggagtgcagtggtgtgaccttagctaactgcagctgccacctctgggctcaagccatccttccacctcagcctcccaagtagctgggactacaggctgacaccaccacacctggctaatttttttgctttttgtagagatgggttttcactatgttggccaggctggtctcaaactcgtgagctcaagcaatccacccacctcggcctcccaaaactgctgggattacaggcgtgcaccactgcatctggccttaagcagtttttttatatgtaaatagagagggattcaaataaccacttggacataaacctttgtagttctttagaaaggttgggaatggaaatataaatatggagtcattggcatacagatgaagataaaagtcctcatgttgaaataggggagttccctaaccgcaggacatacgacaggggtgtggcttgtctgtgtgcactcaatcctcttatgggagagggagcacgcagatgggcaggtgtaggagtcagggcgagcacttttgggctccagccccacggtagcatctaggggtgggtgcctgtgactcccaaagcccaagtgggcatgtataacagtgcactcttttttttttttttttttgagatggagtcttgctttgttgcccaggctggagtgcagtggtgtgatcttggctcactgcaacctccacctcccaggttcaaacgattctcctgcctcatcctccccagtaactaggattacaggtgtgttcccccatgcctgaccaatttttgtatttttagtagagacagggtttcactatgttggccaggctggtcttgaactccggacctcaagtgatccacccatcttggcctcccaaagtgctgggattataggcatgaggcaccccacctgccctggtgttttttgtttgtttgtttgtttgtttttttgagatggcgtctcattctgttgcctgggctggagtacagtggtgcaatcttggctcactgtaacctctgcctccygggtttaagcaattctcctccctcagcctcctgagtagctgggattacaggcgcctgctaccacacccagctaattttttgtatttttagtagagacagggtttcaccacgttggccaggctggtctcaaactcctgaccttgtgattcacccgtgttggcctcccaaagtgctgggattacaggcatgagccaccatgtccggctggggtttttttttgaaacacagaaattctgcaaccagcttgattggtactgctcctttttaaagagatttttaaagagttacttattttgtaaagttttatttattttgaagctagtcaaatttagcagtggggggttgtgtacaaactttagtgacactgagatgaggctagagaaggtagaaactgatggtacctgagaaagatgatatgcaaatgatgtccttgataaagcaagagaagatggcatctagagtgctatcagaagagtctgtttcatggaaggagaaacacttaattcattgtaactggaggaaagcacaagagtatgaatgaagatgcaggtgggttcattgatactcatttttcttaacactcccaataaaatatcattcccattcatagattgaaagagtgaggtttggtaagggagaatgatttatttgtattctatcacggaccagtggcatcaatagttacagaactcatatctctagacttccaggtgagygttccagtttatgtcctttgagattgaagtatcatatacattaatgtgtttcctgtcttcttggttcatctggatgttttgttctagggacagatctggaagcatctttgctaagttttgaaaaacttgaccgtgcctcaccagatctttggccagaacaatgtaagtttttgccttctttatatcagagtcaatgcaggagaaacaatgttcctttttaaagagatttttaaagagttatttattttgtaaatttttatttattttgaagctagtcaaatttagcagtggggggttgtatacaaactttagtgacactaacgttaataagttctgataacaggctgagcttgttggctcatgcctgtaatcccagcactttgggaggccgagttggggaggatcacctgaggtcaggagtttgagaccagcgtggccaacatggtgaaaccctgtctctactaaaaaaaaaatagaaatattagctggatgtggtggcacacacctgtaatcccagctactcaggaggctgaggcatgagaatcttttgaacccaggaggcggaggctgcagtgagcagagattgtgccactgcacttcagcctgtgtgacagggtgagactctgtctcaaaaaaaaaaaaaaaaaaaaaaaagttctgataacccattaccatcagaccaggctgaagagttatcatttaactttaatgattaaagttttattttatttcaaagagaagagattgaagtccagtgttaagaatagctgtttggtggtttaatttgttcagaacacagtgtgactcagaaaataaggagccattaaacaataataattattttgtttgaaccagagtctctctctgtcgcccagggtggagtgcagtggtgcactcgggtcactgcatcctctgcctcagggttcaagcgattgtcctgcctcagcctcccaagtagctgggactacaggtgcatgccaccatgcccggctaattttttgtatttttagtagagacagggtttcaccatgttggccaggctggtctcgaactcctgacctcaggtgatccacctgcctcagcgtcccaaagtgctgggattacaggtgtgagccaccgtgcctagccaacaataatwattattattatatatatgtatatatatatatatgttttttttagacggagtttcgctctagttgcccaggctggagtgcaattgctcagtgttggctcactgcaacctctgcctcccaggttcaagcgattctcctgcctcggctcccgagtagctgggattacaggcacatgccgcaatgcccggctaattttttgtatttttagtagagacagggttttgccatgttggccaggctggtctcaaactcctgatctcaggtgatccacccacctcggcctcccagagtgctgggattacaggcgtgagccaccatggctggccattaattactttttaaaactacatttataggctgggcatggtggttcatgcctgtagtcccagcactttgggaggccaatgcgggtggatcacttgaggctaggagtttgagaccagcctcgccaacatggcgaaaccctgtctctatcaaaaatacaaaaattaactggccgtggtggtgcacacctgctatcccagctactcaggaggctaaggcacgagaattgcctgaacccgggaggcggaggttgcagtgagccaagattgcactattgcactcgagcctgggcaacagagaaagactctttctcaaaaaaatcccccaaactacacttatttgtttgtttgtgtatttatttatttgagatggagtcttgctcatgtcgctcaggctggagtgcaatggtgcaatctcggctcactgcaacgtccgcctccctggttcaagcgatgctcctgcctcagcctcccgagtagctgagattataggtgcccgccacaatgctcagctaatttttgtatttgtagtacagacggcttttcaccaagtaggttggtcttgaactcctgacctcaggtgatccgcccacctcggcctcccaaagtgccgaaatttcaggagtgagccaccacagccagcccccaaaactacatttataagaaattcacataatactgagatatataaagcgttttctcacctttttcaatcactcttttttttttttttttttttgagatggagtttcactcttgttccccaggctgtgcagtataatggtgcagtcttggctcacagcaacctctgcttccgggttcaagcaattctcctgcctcagccccccaagtagctgggatcacaggtgcatgccaccacacctggctaatttttgtatttgtagtagagaagaggcttcaccatgttggacaggctggtcttgaactccagacctcagatgatctgcctgcctcagcctcccaaagtgctagtattagaggcctgaaccactgcacctggcccactcttataacgttaaccactgttaatcgtacaaatccttgtaaaaggtacaactccggccaggtgtgatggctcacgcctgtaatccaagcactttgagaggccgaggtgggcggattacctgaagtcaggagtttgagatcagcctagctaacatggcgaaaccccgtttctactaaaaatacaaaaaattagctgagcgtggtggcacatgcctgtaatcccagctacttgggaggctgaggcaggagaatcgcttgaacccgggaggcagaggttgcagtgagcagagattgcagtgagctgagatcactccattgcactccaggttgagcaacaagagtgaaactctgtctcaaaaaaaaaaaaaaaggtacaaatccttttgacctattttatacagataaggaaataataattttttaagtatgtataagagggattttttttttcttcataatgttggagtcatatgcatgtggcctgccacttaacttactccacatgtgaacagttccatcttggtatgtgtatgtctacttcattcttttaaatatatttcattgtatggatatattatagtttatgtattcatacattatttggaaacttaagttatatctactttgtagttttkttttttttttaatttgagcaagggtctcactctgtcacccaggctttgtgcagtggcgtgatcacagctgactgcagcctcaacctcctgggctcaagtgatcctctcacttcagcctcctgagtagctgggaccacaggcatgtaccaccacaaccagctatttaaaaaattttgggggggacaagatctcactgtgttgcccagactggtctcagactcctgggctcaggctgtctttccaccttggcctcccagagcactgggattacaggtgtgaggcactgtgcctggcctatatctagtttttgactttacagacagtttatcagtgaatacccatgtacacatatcttcatatacatggaagaggataactgtatgagggcccctttcctcacatactagccagtattagatgttactaatctattagtttcattttacatttcctttttggtgagattgaacttttttttttttgagatggagtctcgctctgttgcccaggttggagtgcaatggcgtgatctcagctcactgcaacctccacctcccgggttcaagcaattctcctgcctcagcctcctgaatagctgggactacaggcacatgccgccacacccagctaatcttttgtattttagtagagacggggtttcactgtgttgcccaggctggtctccaactcctgagctcaggcaaagatgttattttaattatatattttttttagagacagaggctcatcctatcacccaggctaaagtgcaatgtcacgatgatagcttactgcagcctccaactcctgagttcaagccatcctcctgcctcagcctcctaagtagctaggactataggtgtgcattaccatgcccaactaactgttttttttttttttttttttgagacagggtcttcctctgttgcccagtttggagtgcagtggtgtgatcatggctcatttcagcctcaacttcccgggctcaagccttccaagtagctaggactacaggggcacatcactacgcctggctaaattttgtattttttgtagagacggggtttcactatattgcccaggctggtctccaactcctgagctcgagtgattcacccgcttcagcctcccaaagtgctgggactacaggcatgagccactgcacccggcccgttttttaattttttgtagagtctggggtcttgccctgttgcccaggctgatcttcaagggatcctcctgccttgacttctcaaaatgcccagccctgatttttatttttctgcattttaatgtgattctttctgtgagaaatttaaataaataaaattggattgacagaacagcatctctaaaaaggcagtttaaactttctggtaagagatattgtatcttaccaccctcccaaccagctaactcctggtccttccaagttcagttgaggcattattttccttgagaagctttttatgccccctgggtctgacttagcttgccattttttgtcttgccatagtcctggcatctttctttgaggactgaaacagtgttatagttattggtttattctttctcttcttctaaactataagaaaacagacaaagctgttttcttattatttggatcttctatgcctgagcaatcatacttattgaataaataaagttttgtttttctttttagtaccaggtgttgctgaatttgcagcttccttcaaaagtgtaagtaatatcccttacctactgaggtcaatccaaagtttcgctcctgagtaaaagctcagatctctgttctttattttattttattttatttatggcagagtctcactcttcgcccaggctggagtgcagtggtacgatctcggctcactgcaacttccacttaccaagttcaagcgattctcctgcctcagcctcctgagtagctgggattacaggtgcccaccaccacgcccagctaatttttgtatttttagtagagacggggttcaccatcttggtcaggctggtctcaaactcctgacctcaagtgatccacctacctcagcctcccaaagtgctgggattacaggtgtgagccaccgygcctggccttttaaaattttttgtggagaagaggtctcactatatttcccaggctggtcttgaactcctgggttcaagtgatcctcctgctccagcctcccatagcattaggattacaggtgtgagccaatgtatgtgtttttgtttttttgttttttttaatgtgaaaaaaatacctactttatagagttgatttggaggtaaatgacttgatgcatgtaaagtgttttgcttrtcacataataggttctgagtacattttaattaaaaaaagagaaagacgcaaagctgaaataatgtttctcaaccctaccttttgtgcatgacagaatcatcaacatgcagctatggagctcttgaaaaatgcactgtaacaaatgagcaccaagaaaaaaattaattaaatataaaaaaagaaaagcacatatgaggagtcccttgctctactttttccactggacccttccctacccctcatattctaaatcattatgtctggagtgtggccaaggcatttatagttttaaaagttacacaggtgattctcgtgtgcaactagcattaaactgccaacccagagctattctaagaatgggctttctttcatagttttaagttcactttcataaatgaaaaattgtaaaattctgaagtttcctaaaacctctacaataaaattgtgaaattccaagtgatgaccattccagacttctctcacttaaaatgatgattttctcattcttgattcttctttgaatctcccgtatgccagagaatgttacttactgattagtgtttcaaacagttgaattggaggctttcaccagaactgaatttcaagtaatttcattcattgctatactaacttgttaggcataaatcagtaatagtggtcatacctattcttccacagtgatttctctgagactgactttcaagatgagccatgttttttgcagtgactatttgtaggccatatctaaacctggagaaatccaggtttttgaaattataatctgccagtatttccaaacaacctgaaggctatgtgacaagctgcattttttctttttcttttttttttttttttttgagacagagtaatactcttacccaggctggagtacagtggcacaatcttggttcactgcaacctctgcctcccacattcaagaggttcaagcaattctcgtgcctcaccctcccaagtagctgagattacaggtgtgtgccatcacgcctggctaattttttttgtatttttagtagagatggggtttccccatgttggccaggcgggtctcgaactcctgactcctgacctcaagtaatccgcccaccttggcagccaccgcatccggcccaggctacacttcttataagaataatagggtctcctcacactttttatgtktctgaatggatatattattttttgacagcctattactagttctccacccaaatggatggctgagatagaacgtgatgacatcgacatgttgaaaggtaagtgatgctagttaccacttttaactggatatttatgtytttmcatagaccacctctctattttttttttctgtttccttacaagtatttttggcttcagacttctcatttaaacctccttatttgtagtttttcatgtctgcaatgcccttctctaccttttccatgtgtagaaatcctgccaattcaagactcagtcatagtgaattctgctgctggtgctaaattcttctaatgtgaacctgattttgtataatacagttaacgaatagctctaacataaattttttcatttaattcccataaaggtcctgtgagttgggtatgatgatattcaaagttcataagttaaccaagatagaatgagttaaaatttggctaggcgtggctcatgtctgtaatcttagcattttgggaggccgaggtgggtggatcactggaggtcaggagtttgagaccagactgaccaatataacgaaaccacgtctctactaaaaatacaaaaatcaaccaggcatggtggcaagctcctgtaatcccagctactctggaggctgagtcaggagaatcacttgaacctagaagacagaggttgtggcgaacaatagttccactgcactccagcctggctgacagagcaggactctatctcaaaaaaaaaaaaaagttaaaaaattttaactctggttttttttttttttcagacggagtctcgcttttgttgcccaggctggagtgcagtggtgcgatctcggctcactgcaacctccgcctcctgggttcaagcgattctcctgcctcagcctcccgagtagctggaattacaggcatcccccaccacgtccagctaatttttgtagttttagtagagatggggtttcaccatgttggccaggctggtctcaaactcctgacctccagtgatccacccacctcggcctcccagagtgctgggattacaggcgtgagccaccacgccccgcgtaaactctgcttttttaagtctagcctctttccattataacacaagtgccttatttagaatttactgccatatattgtcagtactattaaatgacaacctcttagtgggttaagacctattttttatttttttatcccatcaatttcttctataaagaatactataagtagtgaatattgttgtttgataaatgatttgaaactcaatcacaaagtggaaatttaaattaaaaaacattaattttccatgattttgccctactttatttattttatcatccttctggtgataagattcatgatgattgtgaagtaatagactgaaattaaggtaaaaacctgggattcttgaggtatttaaacagctgaacatatcaagaaagtctwcttatgctaggtgtagataatgactgtggcatgataaatgagattaaaaaaaaacacctttatttgattttagaagtaattcattgttctttatgaaatgcttaaatgcagattccctcctcctgccatggaaaaattaagtctcaagggcatctcaggttcattcttctaatgtttcaaacagacatttatataatatctcatcagcatgtatttcttaaggcaactttaaatttttagtgagggatcatagcattatattctatgcaaactgacctgtgtcttaaacctaaaaggaattgggtgctatttaaataaaaattcaggaaagaacatttttaagtattgtctttgtgtgtgtgtgtgtgtgtgtgtatgtgtgtgcaagagactggagttttttttattactcagtctccccgagaatttggggatcagagtttttaaggataatttggtgggttggggggacagtgagttgctagtgctgattgattgggctggagatgaaatcacagggagtcaaagctgtcctcttgcactgagtcagttcctgggtgggggccacaagatcagatgaaccagtttattgatctgggtggtaccaactgatccatcaaatgcaaggcctgcaaaatatctcaagcacagaaacacccaacagtgaaactgccattgcagaattgtaactgtgatggtgaaagagatctgacctaaccaactccatttgctcctaacctccaacagtatgctgtctttttacttagtaaacttaaagatttttataggaatttgatttgaagggaaagtttagatttttatttagtctttgttttctaaacttagggaaatggggaatagtaagtgttttgttgccactttattataagtcgaaataatgtggacttacaattaacagtggagacagtgtccattttgtcagatcagatctgtcttcaaggctttcttaatgctatcaaaagacaaggttttacattttaatgatgtattccaaacaaatgttataaataatgtttcctgaggatgaatcacttaatttgttactttattatttttttctttttttatttgagaaaaggtctcactctgtcacccagactgtagtgcagtggtgccatcatggctcactacagccttgacctcctggtgatcctcccatcccagcctcctgagtagctgggactacaggcatacaccaccatacccagctaattttattttatttatattttttttttgagaaggaatctcactttgttgcctaggctggagtgcagtggtacaatctcagctgtctgcaacctttgcctcctaggttcaagtgattctcctgtttcagccttctgagtagctgggactacaggcgccygccaccacacccagctaatcgttctatttttagtagagayagggtttcgccaggttggccaggctggtctcaaacccctgacctcgggtgatctgcccgccttggcctcccaaagtgctaggattacaggcatgagccaccatgcctggctgaatttttgyattatttttatacaggtgaggtatcattgcccaggctggtcttgaactcctgggctcaagtgatcctcttgccatagcctcccaagtagctgggactgaaggcatgtgctaccatgcccagctaattctgtttttatgctagttcttttcttattaagtgggtaagcttatctgaggaattttgcaatagtgggaaaattccctgatttgtgtgtgtttaagattgggggaggagttacggatccatyttctacttattcagtggtaattaagcttgaaaacttgtataacaagagttcccaacccaaggaagttgctactagagaagagtggaaagaaatgatgttgaaataaatgattctgtttcagaactggggagtctcaccacggctaatttgatggagaaggttcgaggcctacagaacctagcctatcagctggggctggatgagtgtgagtacccygatcgcatttgttcaggggtgtattccaccctgagctgtgtattccaccctgagctcaggtattccaccctgagctccagttataattcagaaagtatattagggaaaagagaagcattctgaaggtaagaagtcartctaattcattgactttttatggtggagtgtggtggaataattactggatttactaggtaacaaatgatttttcttttttttttttttttgagacggagtctcgctctgtcgcccaggctggagtgcagtggcgggatctcggctcactgcaagctccgcctcccgggttcacgccattctcctgcctcagcctcccaagtagctgggactacaggcgcccgccactacgcccggctgattttttttgtatttttagtagagacggggtttcaccgttttagccgggatggtctcgatctcctgacctcgtgatccgcccgcctcggcctcccaaagtgctgggattacaggcgtgagccaccgcgcccggccgatttttctttatacagtaaaagtatattgaaatcccttcaggttattatctcatttttaaatagacagagtcttactatgttgcccaggctgatcttcaactcctgggctcaagtgatcctcccaccttagcctctgaagtagctgggactacaagcatgtaccaccgtgcctgggtaattaaaaaattttttttgtagagacagagtctcactatattgcccaggttggtcttgaactcttgggtttaagtgatcttcctgcctcagccttccaaagtgctgggattatgaaccaccgcacccaaccagcattttagtttacaaataaatttaaggctggccacagtggctcatgcctataatcccagctagttgggaggctgaggatggagaatcacttgaacctgggaggcagaggttgcagtgagccaagatcatgccactgcactccagcctgggcgacagagtaagactctgtctcaaaaacaagaaaattaatttaaaatttctaattttcaactgatagtcgtcacttcctcagacctctttatccttcctttatttctattactgtcatcagcagttggctttcttttaccaagaaaacatttttgaattggttatggaatcaagaaatagagaacaacaaactgcttcaagatatggttgttagctgctctgctaagttcactcattagtacctaactcttctctatatactggtaatttatttcttatgattaaagtttataccttggcaaaattactagttaccatgtatgtcatggacctccttgatttataatgaaaaggcaaatctgtgattagtaaattcatgaatgtgagactttcatagtcgattttgttccttgattttgtttctagctttggataataaatgctgtaatgatcattgtgatcaaggctttatctctttgtgtcaatgtttttcaatgaagtaaatgttatgtttgttatatcaagaagatgctatattaccaaatagatttgtcagtagtattatctatagttatagctgaaattatggttcctctaattagtttctctttttctgctttcctactgagaaaggtaatgaagtattttttcctgctttttattatttatrccaaagtagagtgaacggaataatgacccatggcccagcttcagtaatcaacatatagccaatcttgttttacttataacaatttcctgtagctactttaaagcaaattccaggcatcatattaccccattgccgagtaactttgtatgtgtttccagaagacaaggactcttactttcttttgctgttttgttttgttttgttttgagacagagtcttactctgtggcccaggctggagttcagtggtgcaatctcggctcacggcaacctccatctcttgggttcaagtgattttcctccctcagcctcctaagtagcggggactacaggcatgcaccatgatgtctgaccaatttttgtatttttagtagagatggggtttcaccctggtggccaggctggtctcaaactccttacctcaaataatatgctcaccttggcctcccaaagtgctgagattacaggcatgagccaccacacctgacatattgttttttttcctttctcttcaggaacagtggcacaaaatgtaagatttttttttttttttttttttgagatggagttttgctcttgttgcccaggctggagtgcaatgacatgatcttggcttactgcaacctccacctcccaggttcaagcgattctcctgcctcagcctcctgagtagctgggattacaggcatgtgccaccaggcccagctaattttgtatttttagtagagatggggtttttccatgttggtcaggctggtcttgaactcctgacctcaggtgatctgcccaactccgcctcccaaagtgctgggattacaggtgtgagccaccgggcctggccagttttttttttttttttttttttttttttttttttttaagagactgggtttttctatgttgcctaggctggacttgagttcctgggctcaagcaatcagcccacctcagccttctgagtagctgagactacaggcacataccactgtgcctggctttttctttcttttttttttttttgagacggagtctcgctctgtcgccaggttggaggttgaagtgcagtggcgcgatcttggctcactgcaacctccgcctcctgggttcaagcgattctcctgcctcagcctcccaagtagctgagattacaggctcatgccaccatgcctggctaatttttgtatttttagtagagacggggtttcaccatgttggccagaatggtctcaatctcctgacctcgtgatccacctgcctcagcatcccaaagtgccaggattacaggagtgagccactgcgcccagctggctactgttattttttaaaaatataacaatagtttcattattataactamaatttttttaacaaacttgttaaatatcatcaaatagccaatcagggtttagatttctgtagttgactcataaatgcctttatacagttcattttttgagtctggatstaaataaggttcatatactgtatttgatatgtctctgaaatcttttttagcctgtcatacttccacctgcattttatttccccttgtcatttgttaaacctagtcatttgttctgtagatttttcaaaatctgggttttgttgattacattcctgtggtagagcttaacatgttcacctatcccttttttatctgctgattgttagatctagaagcttgcacagatacaggcttgattttttttttttaattttgataagaatatttcacagttggtgttgggtacattatgtgtgctggtctttctttttgtgatactaagattaatagttgatggattctagatctaactatcaggaaataaaaagggataggtgaacatgttaattaagctctaccacaggaatgtaatcaacaaaacccagaatttgaaaaatctacagaacaaatgactaggyttaacaaatgatggggaaataaaatgcaggtggaactatgacaatcagatttattcattgtaatattcttcatcagtcttatacctagagtagcaggctttgatcacagtctagatttactgttttattataggttgcaaggtagtaatattctgtcatttctctcattgactagaatttttctaaaaaggactgtatcttatcaactatttggttacctcgaaaactgcttctactggcatgatgggataaatgattctttttctttctttattagttttcagaataatsagtttgttccctaagcatcagtaaagtttattttaatgactttcaatggaatcaaaaacttggtgtggcatttgttatttttttaaatccacacaattaaagccattattactgctaactgtatttctaaaaacttaaggctttgggggtgggggtttgaagtcatttaattcggccaccttcagcactaaaccaaaactgtataagagaaatgcttgtttctgccaaatgagtcccatgagcacagctgagattgttcagaattatcttctacctcaaaatttggtgttmtttcaatttccatagcattgctttgcaactgattgccgttttccttgaccatcgtgaatttagctgacatgaaatagctttaaaatttagaatgagaaacaattacattgatgtgtattgaacttcttacatacagtctctctttgttttattgtgtgtagtgtatttgcattaaaaacaagatttttttttttttgtccttacagattattcatctactctaggggttggcttttacttgacaccctaatctggtgtttcratgtctaaatcctctttcctgcattaattgagaggatgacatgggtgaaaaataagcagtaggaactgatgaatccccaaggaccagtgatcctgtttttatgcaaatatctgcactgataaagatgatggaaagaaaaaaaatgcaaaaaatatttgtcctcaaaacatgattgtttgtcacttcccaagagcattgttaaatgttagtataaaaattatatgaaccttctagggctgatagtaactaggttgtgtcttttggaagatgagtgctaccctttgaattggtacatgattatgcctcagataacccttttggtgtgcaaattttggaatgcagtaacttttcttatagggatttatagtctctcagatgattgaggcctcttggcttgatttgggcagttaatttatatgaaattcccttgaaatatatagaaatatttaaaaaagtaaaactctgccttagcatatgaagaattccatttctattatttccatctgagctcagagtcctccctcttttactggaactatgttacagtcaccttctagctggtccctctgcctctcaactagcccattccaatctatcttgttactgctgccgcattgtttttgtgtttgtttttttgagacaaggtctctcatccaggctggagtgccatggccttatcatggctcactgcagcctcgaactcctgggctcaagagatcctcccacctcagcctcccaagtagctgggactacaggtgcagtgccaccatatctggctaatttttttgatattttgtagagacgaggtctcactatgttgcccagactggtcttgaactcctgggctcaaccagtcctccctccttggcctcccaaagtgctgaaattacagacatgaaccaccatgcctaccccagcctgatttattatttatttatttgtttattttttgaggcagtgccttgctttgtctcccaggctggaatgcagtggtgcagtcttggctcactgcaacctccacctcccaggctcaagtgattcttatgcttcagccgtccaagtagctgagattacaggtgtgcaccaccatgcccagcgttttaaaaatatttttagcagagatggggtttcactatgttggccaggctggtctcgaacttctgtcctcaagtgatttgcccgcctggcctcccaaagtgctgggattacaggtgtgagccaccacgcccggccccggcytgattttttgaagtacattttcttctctttgtcttttgctcataaatcattggtactacttcattacccataggataaaatttaggccccttagtgtggcattcaaaatcctttgcattctgrccctcgccggattactctagccttcttacatctcctctaccaaaacacatgcactgtctctgtctgaagcttcgggaaattgttctttttctgggtagttggtgttttagtgatgagacgtaatatttgaaggtcttatttctggaatgtcttctcttatgacagtggatggtcaacagcacagaataaatacagtgtgaaacttgttgatgatcgcttggtttatcttctacttgaaccctactccatcactattattacatgcttatgatcctgatttagacctgtaagtttcaatactacattgcttcctttattcctaaggttcattatcatgaatcctattgaatactagttctcagcagtttttaccctctctttctggaatacttccccatcttcttagttctactcatgctattcctttttctcggtaagctgtccttctatcagctttcccttttcatccttgatttagaaagtgagtgctctctctggcctctcaaattgcccctagagcagtttgtttgtttgatttgtaaggtgcttttaccattcttcttggagatttttggtacatgtctcagtccttggactgattgtaactttttaagataagaatcatatttttactttttcagcccatagcccatagatttttttccccatctctgaagaccacagaccagttagtagtcatgcaaatgacctacttactagctatctttgaaatatttttaaataaaatgtgaaaactgggaaagcagaggattgtatcatttgaaactacggctaaaccttgggaccctgatacatttggtttttttctcttttttttgggtaacagctttattgagatgtaattcacatagtctataattccccatttatagtgtgcaattcagtgatttttgtatattcagaattttgcagtcaccaccacaaccaattttacaacattttcatcacctgaaaaaccttgcacccattagcagtcactccccattacttcccaaactccccagacctaggctgttacttactggcttcatgtctctatggatttgcctcgtctggacattgcttgtaaatgaaatcatataatatgtggtttcttgtgactggattctttctgttaagataatgttttcagtgttcaattatgctatagcatgtatcagtgctttctttctttttatggctgaataatattccattgtatagatacgccacattgtatttatctacctggtgatgggcgtttgagttgttttcactacttggctacttcaaataatgctgctgtgaacattcaggttcaaccaaaacwcacaactttttgggtaaacatgttttcattttcttaggtttatagctagaggtggaattcctgggtcatgtggtaactctatatctgatctattgaggaactgtcagactgttttccaaactagctgaaccattttgcattcccacaagcagtgtataagggttccagttttctcacacccttgccaatacttgttatttgtattttttgtttttttaattattatcatgtccatcatagagggtatgaagtagtgtctcattgtggtttggatttgcatttgtctagtaataatggtgtttagcatgttttcatgtgcttattatatatcttctttggagaactatcaattcagatcctttgcttatttgtaaattgtattgtttgtgtttttattattgaattgtaagacttcattatatattctagaaacatatatatgttattatcacatatatgacattatcagatatatgacttgcaaaagttttctctcattctatgggttgtctttttactttcttaatggtgtcctttgaatcacaaagctttaaattttgatgaaatccaatttatctattttgttgttgcttgtgttttagtgtcctacctgataaaccattgcctaatccaggttctcaaaaacttatgcctgtgttttcttttaagagttttataattttagatttaggtctttgattcattttaagttaatttttatatttggtgtgagatagggatctaaattaattctttcgcatgtggatatccagttttcttagcatcgtttgttgaaaagactatcctttttctattgaattgtcttgacatccttgtaaaaaatcagttggcagccaggcatggtggctcacacctgtaatcccagcactttgggaggccaaggtgggagaattgcttgagcccaggagtttgagacaagcctgggcaacaaagtgagactccatctctacaaaaagattaaaaattagccatacatggtgatgtgcacccatagtctcacctactcaggaggctgagcctgggaggttgaggcttcagtgaaccatgatcacacctctgcactccagcctgggctatagagagagaccctgcctcaaaacaaaaaaaattggttggccgtaaatgtgaaggtttatttctagactctcattctattccattgatgtaatctctatccttatgccagtaattcactttcttgcttactgtagctttgtagtaaattttgaaattgggatgtgtgagctttccaacatcaacaatgttttgcaattttcaaagcacaaatattatacttcatttgttaaattttttcctaagtactttattctttttgatgctattataaatggaattgttgtcttaatttcattttcagtttgctcattgctactactgagaaatagaattaatttttgtatattgatcctgtattctgcaacttcgttgaacttatttctttagttctaataatgttttagtagattatttataattttccatatacagaattgtcatttgcaaagagagacagttttacttcttcatttccattctgactgcctttaaattaattctttttcctaattgtcctggctagaaatcccagtacagtgttgaatagacgtggcaggagtggacatccttgacttttcctgatctttgggagaaacccacagtgttagctgtgggctttttgtagatgtgctttaatgtaaataaggtaacactgaatatattaccttctaaaaaagctttgaggaatttagcttactttgatataagtagttgcttctgctgattaatcatataattctgtacgttcatgtagcagtttaatgggactgttatttggctaaattttatcactgttgttttttaaaagcaacatttcactgtaaaaagattgagagggatgccaagcggggatgattgcttgaagccaagtgtttgtaaccagcctgggcaacaaaacgaagactccattctctaaaagaaagaccccatctctaaaagaaaaagattaaggccagtgtggtggctcacgcttgtaatcctagcactttgggaggctgaggtgggcagataacctgaggtcaggagtttgagaccagcctggccaacatggtaaaaccttgtctctacaaaaattagctgggcatggtggcgcacgcccatagtcccaggtactcaggaggctgaggcaggagaatcgcttgaacctgggaggcagaggttgcagtgagccgagattatgccactgcactccagcctgggtgacagagcgagactccatctcaaaaaaaaaaggaggccaggcatggtgcctcacgcctgcaatcccagcactttgggatgccaaggcaggcagatcacgaggtcaggagatcgagaccatcctggctaacacagtgaaaccccgtctctactaaaaatacaaaaaaagttagccgggcgtggtggtgggcacctgtagtcccagcaacttgggaggctgaggcaggagaatggcatgaacctgggaggtggagcttgcagtgagccgagatcgcgccactgcactccagcctgggtgacagagcgagactccgtctcaaaaaaaaaaaaaagattaagatgtctccattcaaaacttaatactttatcccattaatctacattgatgaagttatctatacaactttactatttggtactttatttgatggtagtaactaagaaaaactgctttcaagaagcagaagtttccacagcactagcctgtggtactagacttctccaccctctgggcatgtgatttgcaaaaaagtgatcatttacatttagaagttgtttcccatctagataaaattctaaacagttcttttgatttgtaattttaatatataaaggagggaagggagagtataactgtgattcttacacctttttgtttttttggagacagggtctctgttgcccaggctagagtgcggtggtgcagtcatagctcactgcagccttgacctcccaggttcaagcaatcctcccagcccagmctctcsagtagctggaaccacaggacagtgccaccatgcctgactgatttttttttttttaatttttattttgtagagatggggtctccctgtgttgcccaggctggccacatcctcctaggctcaagcaatcctcccgcctcagcctcccaaagcactgggattataggtgtgagccaccatgccctgcccctggtatttatttatttatttatttatttatttatttatttttgtgggctgacatcagaattatttgtctggcttcccttattaggccaattaagtcctacctctcatagaactaaattaatagtccttgactgaggagaaaaatcatctagcctttaacctctagatggcagcatgagtctttctgtaccactaacagaaagactacccacatctcttgaactggatttttgatctatgtaaaaacttgttgtgattttttttctttttttctttttttttgttttgagatggagtttcgctcttgtcgcccaggctggagtgcaayggcgtgatctcagctcaccgcaacctccgcctccgtggttcaagctattctcctgcctcagcctcccgagtaactgggattacaggcatacgccaccacgccaggctaattttgtatttttagtagagatggggtttctccatgttggtcaggctggtcttgaactcctgaactcaggtgatccgcccacctcggcctcccaaagttctgggattacaggcatgagccacagcacctggccccttcttgtgatttttaccagactacttgcctagctttgttgataccttgttgatttttatttttagctttttgtttttcttttttatctcttcatctttttttacatatttccttgtttgtttgtttttttttaaatttttttttgagacagggtttccctctgttgcccaggctggagtgtagcagcacaatctcggctcactgcaacctctgcctccggttcaagcgattctcccacttagtagaaaaaaattctaaaaatgtggttaattcaatagtttttatatctgcatataagaccctaaaaatgggttaagttctcttgtctcaatactttcccctaccagtgacttatcttgtatccttggactctgttggttttcatgtggtatcaggcaatgctctattacattaaacaggaatgttagctaaagttgatgaaactacattggactaattagtccttcaagaaaaatttaattgttttaaaataaagctttcaaatatttagccattttgaataacaaaagaatgaagtgtcctgttcagcaactgtttgggtgactacttcatacaaggctatgyaggggataggaagataattactgccctcttgtagattaaaatctagtaggaaaggaagataagacaactaaggtaaatgattcttaaaaaaatatagaggagaaaagctctatgagagtacaaagaactatatggatgggggagaagaggcaattgcattagattgctacaggagtggcagataaacttcattttatttagttaagacctgcctaggaccattgaattgagaaagattttgagagggagcctagattcagagaaggcaattagtgatgtctgttatagacaagggaaatgagtatggtaatatttgcaatttctggaacattggaaataaacctggccaggtgcggtggctcacgcctgtaatcccagcactttggaaggctgagttgggtgatcacctgaggccaggagtttgagaccagcctggccaacatggtgaaaccccgcctctactaaaaatacacaaattagccaggcgtggtggcgggcgcctgtaatctcagctacccgggatgctgaggcaggagaatgacttgaatctgggaggcagaggttgcggtgaactgagatgatgccactgcattccagcctgggcaacagagcaagactctgtctcaaaaaaaaggaaggaaggaaagaaagaaaaccttaaagaacacaaagatgggtagaaatggaaagggagcatattctaggtagagtgaatgttaaagagtttgaaagcaacagctctgctcaaggaacggtgcgagtggttgaatctagaccccaggttatgttaggtctcataatgactaagactaggaaggagatagaggggccagactgaggagggccttgaactccaggggtcaaggagttattctcagtggtagtagggagcatgtgaaatgttctttaaaaagtatcttaatgctgtcaaattaactgtgtgtgttgtagatggtttggggagaccctttactaaaagagattttactacaattttttttattgtaaaaataaagaagaaagtaaaaaaaagaaaaccaccaacaaaccatagccttaccactgagagataaccactattaacatttcatgtgtttcctggccccacttttagtccctttatgtgtctatgtgtgtgtttatatgtatacttgcatccattcatgtaccatgtacacagataatgctatttttctttcttttcttttttttttcttttcttttctttttttgagacagggtctccctctgtcacccaggctggagtgcaatggtgtgatcttggctcactgcaacccctacctcccgggctcaagcaagtcccccacctcagcttcccaagtagctgggactacaggtgtgagccacagcgcccggccagaaatgcttttttaatataactgagattagtgtgtgtgtgtgtgtgtgtgtgtgtgtgtgtgtgtgtgtagttttaacttgtgctttaaaaaattttattctatcttaagcattttcctgtgtcattaaaagttctaccactgaagatttttgaataggaaagatacacacctttaggaggcattggtgcacaggatagagtaggatggtagagagaggaggcaggaagttacagtgggaatccagggtgaaggattgagagcttgaatggatgatggcagtgagaatgggaagaagtgcactgacaatagatttttcagatttggaatttttaggagtaggtaaatgtctggatggggatgttacgggataagctgaaattagagcttaccatgatgttttagcctaattaatgacagggaagtcagaaggaggctagatgcctgcttaacaacaacaacaacaacaaaaatcacataattcttttacttgctcctttgtaggcaggcatctttattttcttagaaataagtaaatgtcatttgtagaggctagaggttagtgttattaataagatatctagttcagtcatattacctaggcaacaggtaatgttttagatagtgaatggtgagttatttgatctcaaagaaatcaatatgtgaaataggatrtacataacttcagaagttgacttgtgaagtccctattttctttggctggtcattaggctgctaagtagaatgactgacttttgtatggttttcttccacaatagtgctttttctttcggttccctacctatgaacttttcctgaactttcctacaagtttaaaaagttgttatggcctctctatacagtagacatccaattctttgttaactggaaaaaagtttcagaagtttaaatttgaagtaacaggaattggtccaaaatatttgttgttgctcatgttttaaataagcgacattggattatatcagcactgggataattcccrttaggtattatgactgcaatttacatgcaattggaaattagtgattgagagggaaacagattgccaaattatcttccaaaaaggtactccccactccatatccttgctaataacaagtattataattatttaaagtcattgccaacttgataggcaaaatattgtcttgttctaatgttcatttcttctattgtgaaggcgaactttttttttccatgtttcttgatcctatctgttgatgagggctggaagttcaagaaagtataaatttaaattattttaacctgaaaaataaagccagagaacttgattsaaaagcaccccaaagactgtgttgaaatctgcattgcaaatactgatggaaacttatccttgttttctttgttttatgcattactttaccatcttgccatagtcattagctttgcacctatttaggttacagcataaaatctaggaactccactttgaagggatcatggttattcttaattagaaattgtcaatttagccttaagtrttttattttttgaaatgttttatgataatgtgaagtaaaccatgccattatttctcatttttcccttggttaacaaattaggatatacaaatcttcaaattacctttaaggcttgtaaacattcaaatcttttatccgttagtcaagttatttcataaacccaacattgcctctgaaatggctttacacacaaagaggattttaccataaaatgcttgtggtgtttcattctcttctgattttttgtaggggaagggggttggagagtaggcagagtataaattaatttggatggtgttggtttcaaagtagcattccatgtaattctgcagaaagtrtgataaataagaaaatgggccaggcatggtggctcatgccataatcccagcactttgggaggccaaggtgggcagatcacctgagattgggagtttgagaccaccctggccaacatggtgaaaccctgtctctactaaaaatacaaaaattaaccgggtgtggtggcacatgcctgtggtctcagctactggggagactgaggcatgagaatcgcttgaacacaggaggtggaggttgtagtgggccaagattaagccactgcactccagcctgggcaacagagtgagactctgtctcaaaaaataaaaaataaaaaaaatacataataaaacaaagttcaacatttgggaaataccaggtgaattatagtgttacccatacagtagaatacaatgtggtcattaaaaaacattaaaggggctggccactgtggcttacgcctgtaatcccagcactttgagaggctgaggtaggcggatcatttgagatcaggagttcgagaccagcctggccaagctggtgaaaccccgtctctactaaaaatacaaaaattagtcactcgtagtggtggacacctgtaatcccagctactctggaggctgaagcaggagaatcacttgaacctgggaggtggagcttgcagtgagctgccaagattgtgccactgcactccagcctgggtgacagagtaagactatgtctctaaaaaaaaaaaaaagaaaagaaaaaaagcactaaagggcatttcatgacagaaaggtattcattatatataaggataatagcaagtgacaaaatgcagaacatacaattttacagcaggtgtttttttttttttttmttttgagagcatggacatagacaaatggctggaaggaaatacaccagtatgttttaatgactatcttgagtggtttttaaaattttctgaattttccaaattaacaaaaacacattctagtctgttgaataggaaaaaaatactacttaaaaaaataaggaaaagttgtatgccattttagaaacaaaattgtacttaaatctctgaattttctaggcagttaaatttttgagctcttctgtggactgtttctaaataaaaatgagtagatccattaacaattgatcagtttatacaagtgataaatagcaaggtgaatgtttcccatacatatctcatttcccatactcaggatgtgcttgcataagtaggaattgagagcaaaagaaatggtaggctgttgggtcatgggcaagagacgatttagttggccaaagaagcatattttcttaagcaaatgttggccaagatgttactttatgttttcgggctgtcttcactgtagttggagaactgtgaactcttggtattaagtactcagtaggagcaaagaaccatttggaatgtctgtcaatcttaaatagaactgcagctgtttggctgagaggtgaaatggacctggatttyttttttttggcgggggggctttgaaagtagtttttgtataacaaagaggtgatgagaactaaagtgattacaaaagtgttcataggagttcagtttctttccaggctttgggtttaagaatgactgtttctgcccatggggaaataaattggcatttttctgctttcgtttgttttttagttattgatgttctagaaatttcaacaaaataaggagtgtttttgtatttcaaatgtagtgcccgtttctttatttctttctggtactttccactggtttgtgttgataatatgatctggaaggtagcgataatgcatgggaatttataaatgatcacaaaatactttgtcacaggaaatctggagaaataatgactttggcatatgtataagagaagtatctctaactgttaagtctaaactaaaagcttgttacttttcggtttggtataaccaaaaaaaatttgaaaaataaaatagaagtaatgatttgttttctcaggtgtagttgtatttgactgactctattgtaggaggacacgtttaagactgaatggttggataacggtaaagacgtcctttcaatggagagttgaatctgataggttgaagttttggatattgaatgaaaagagaaaagagagccggacaagctgaaaattcctgtagttccaactactggggaggctgaggtgggaggatcacctgagcccaggagtttgagactgcagtgagctatgatcatgccactgcgttccagtctggatgacagagtgagaccctgtgtcaaaaaataagtaaataaaaagaggaaagagctaaaatgagaattcaatctgattcagaatataaaaatattctactgtcccatcattttttgttctttaataagctttaacattgaagtataatgtatataaagaaaarcacacaaattataatgtacaactcaatgattttcataaaattaacactcccctgtaaccgttggtcaaaacagatcaagatacagaacgttgcgcctggtgctgtggctcatgcctgtgatcccagcactttgggaggctgaggctggcagatcacttgagctcaggaattccagaccagcctgggcaacatgataaaatccagtgtctacaaaaaatacaaaaattagccgggcctgctggtgtacacctgtagtcccagctacttgggaggctgaggtgggaggatcacctgaacctgggaagtcaaggctggagtgaaccaagatcacaccattgtactccagcctgggtgacaggagtgagaccctatctcaaaacaaaacacctttctagtacataaatacaaaatctcctttgtgccccttctagtccctacttgccccttcctctcaaagcattactgtgacttatactatcatagaataattttgtttatctttgaactttatgtaaatggaataacaaatcacatactcttttgtgtctgacttttgatcagcgtttaaattatgacatcggccatatcatttgggttttctcccattgctatatagtatttcattgtaagaagttaccacaatttatttcctcgttctactaatgatggatatttggactatttccagcttttggttattacaaataaatactgttagtatttttgatatatatctttttttggtacatggattttctttctttttttttttttttttttgagacagagtcttgctctgttgcccaggctggagtgcagtggcaccatcttggctcactgcaagctccgcctcctgggttcatgccattctcctgcctcagcctcccgaatagctaggactacaggcgcccccccaccacgcccagctaattttttttgtatttttagtagagacagggtttcactgtgttagctaggatggtctcgatctcctgacctcgtgatccgcccgccttggcctcccaaaatgctgggattacaggcatgagccgccgcacctgggccgtacatgcattttcattggatatataactaggaagtggaattgctagatcataggggtatatgtatatttagctttagtaggtacttccaaatattaatagttttccaaagtggttatatcaatttacaaacctatcagcaatttcagttgctccaagtccttaccaacaggtgtattctcagtcttttaacttctagtcrttctaataaatggtatcttaatgtggttttaatttgcatttccttaatgactaatgaggttgagcacctttttgtatgtttattggccatttggataacatcttttgtgaagtccttattagtgtctcttgcccattgcccatctttaaaaactggattactggattattctttttttttttttttttagatggagtttcactcttgtcgcccaggctggagtgcaatggcacgatctcagctcactgcaatgtctacctcctgggttcaagcgattctcctgcctcagcctcccaagtagctggaattacaggtgcacgctaccacgtgtgcctaatttttgtatttttagtaaagatggagtttcaccatgttggccaggctggtctcaaactcatgacctcgggtgatccgcctgcctcggcctcccaaagtgctgggattacagacatgagccactgagcctggcttggattatcagtctttaaaaaaatgatttgtaagtactgtttatatattctggatatccaccctttgtcagtcacataaattgcaaatattccactttgtagcttcccttttaattttcttaatggtatgttttaatgaaccaaagagttttttcccccaactttttatttgttgaaatttgaaatctttaaaaaagttttggccaggcgcagtggctcatacctgtaatcccagcacttcgggaggccaaggccggtggatcacctaaggtcaagagttcgagaccagcctgaccaatatggtgaaacactgtctctactaaaaatacaaaaagtaggccaggcgtggtagctcacacctgtaatcccagcactttgggaggccgaggtgggcagatcacctgaggtcaggagttcgagaccatcctggccagcattgtgaaaccccgtctctactaaaaatacaaaaattagccaggcttggtggtgggtgcctgtaatcccagctactcgggaggttgaggcaggagaatcgcttgaacctgggaggctgaggtttcagtgagccgagatcgtgccattgcactccagcctgggcaacagagtgagactccctctcaaaaaaaaaaaaaaaaaattagctgggcttggtggcgtgcgcctgtagtcccagctactcaggaggctgagacaggagaatcacttgaacccaggaggaggaggttgcagtgagccactgcattccagcctgggcaacagagcgagactctgtctcaagaaaaaaaaaagtttcaagccaggctcagtggtatgcacctgtagtttcagctactctggatgctgaggtgggaggatcatttgagcccagaagtttgagtccagcctaggtaacacagggagactctgtctcaaagaaagaaaaaaagcttaaaactattccaaaaaaaaccatgtagtaggcacaagtatttctaaaaataaactatacacagtagattttccccttggagtcaagttgtaaattctatcagcagagcattgacctaaatcattataacccaacagaaatcagtggctcccatataattcccagaggtttccctgtccccacccaaacaacttttctctattcagcaattctccattgcttagatctgctgtttccattctatattattgatttactctatatttcttataccactagccataatgattttcatgcatgtaacaaacagatttcatctattgatttcataagtaagtgatgcaagttttaatgactaatgtgagactaacattttccttattcgttcctttccaattctaagataytttaatgcatcaactgaatagtgaagtcattattgcaaatgcttttatcacatagtgccgaagttagttagcaaatagttaaagaaaatagttaaagatgctttggtttttccaggaaagtggttttccaaaaattttcaaataatgatggtaatacattaaaaaatatatcactcaacaagkttgtcagaaaacttacacatcaaatcaagaaaacagtgagttaaggaaagaggaaaacacaccttcactttcttttttttttttttttaagacggagtctcactccgtcacccaggctggggtgcagtggcgccatctcaactcactggaacctctgcctcccgggttcaagtgattatcctgcctcagcctcccgartagctgggattacaggcgcgcacaccacgcgtggctaatttttggatttttagtggagacggggtttcaccatgttggacaggctggtctcaaacacaccttcactttctccactggaatttttgtttatcatgtaaccagtaacaatattctcatattcccatgagaagaggttgaggaagaaaagaattcacactagtaatgtagtattttatttctgagatgctacagctttgacattattataacccaaattaaaagaacaggagtgtcattaaccaaaaaggagaatattgctaaacggaactgtagtaaaatttaaaacttatgttcaaattggagatattttattatggattgaaaatcagataattgtattgtgttaaattttttgagtttgttaattatattgtagctatgtaggagaatatccttgttcttaggagayaatgctgaagtatttagggatgaactatcatggtgtctgcagctagctctcagatagctcaggaataaaacaacaaaatttaaaaatataaatagatgaagcaagtgtgtaatgttaacagttggtgagcaggtgaagagtatatgattattcattgtagtattctttgtttctattttatttaaaatatgttaggatattttaggctctagaaaatttcactggacacttgtgagagtatgagtgaaaagagcatcttagtattatacaaataatttttacctgtccgggtgcagtggctcacacctgtaatcccagtactttgggaggccaagatgggcagatcacttgaggtcaggagtttgagatcagcctgaccaacatggtgaaaccctgtctctactaaaaatataaaaattagctgggtatggtggcaggcacctgtaatcccaaatacttgggaggctgaggcaggagaattgcttgaacctgggaggcagaggttgcagtgagccaagatcatgtgctacggcactccagcctgggtgacagagtgagactctgtctcaaaaaaacaaaacaaacaaacaaaaacaaaaacaaaaacaaaaccagttttgacctagtggacccccaaaagaagtatggcgagcccaggatctgcaggtgttccctgaccacactttgagatttgttgccttagagtattattttgatgatttgatacagccttatttataaaactcttagctcactgtctggatcttaataagttcttaaaaactattaactgttgttactcttatgagcagcatatgagaaattttaagcatggtagacatctgatcatatttacattcttaggtcactttgctaacatggtagaaggtagattggtgaggaatgaaaatagcaacagggagatgagttagattactttagtaaactagactacaatggtaagcccttgaactaagacagtagaaatattactggagcataaaggatgggttctataaatcctagtaggagaatggaaagttttagtgactgattggatatattgggattgggaagtcctgggcagtaagaatgaggaaccaagaacaattcttaggtttctagcttaggtgtatataggaagaagaagacctttgagaagaaagatttgggagttcatttataagtgtatctgtaggctatctaggtggaaataaatacctaggagacaattgaatagatactagagcacagggaatttggatccttgatccataggttttatttaaagccatagatgagagaagccaggaggatgtgtagcattaaatatagaaccgtggtgtggtaggcaccctctaagacggtccccagtgatccctgctactagtgtgcccttgtttaatcatctcttgagggtgggctggacctaatgatagtaaaagtgatggaatcccacttctgagattaagttaccaaaagaccatggcttctgttctccccttcatcccccagagaagcacattgccatgtgagtataaagaaaactagcctgggatttcagagatcctggttattggaagtagatctgttctacttactgacttgataaataacctctctctgagtttcattttccttttctgtgaaattaaggtaataataatgcctcttaatgagctgttgagagagttaaattggatgatgattataaaatgcttagtatgagtcttcatgatcttggatttggccatggatttttatttatttattttttttacaagatgatcatggactttattcatttccaaattgtaatgttcagatatgttactggaatcaaaaaagaattgagctaggttcctggaaacaaaataaatagactaaccaaattctatatccaagacaaacagaaaaaaagaaattaaaaataccatctaagatgtcagacagtaataaagatgtagtacatctacagaatgatgtatgtaagatctctatagttatacaataacacttcatggagagcctttgtaaaagaccaaatgagtgaatatgaataaatactgtaagtagattagaaagctcagtatcttaaagattcagtttctcccagaaacattcgtgaatttaatataattcaaattacaatcccccaaaatttcttgaaacttgaaagttcattttaaaattttatagaaaatcaaagagccagtaaaagctaagaggctcctgggtaggtgyagtggctcatgcctgtaaccctagccctttggaaggctgaggtgggaggattgcttgagctcaggagtttgagaccagcctgggcaacatgatgaaaccccatctctgcaaaaaatgcaaaattagctgggcatggtgatgtgcacctataatcccagctactcagtggggctgaggtcagagaatcacttgagcctgggaggtggaggttgcagtgagccaagattgcaccactgcaccccagcctgggtgacagagcaagaccctgtctcaaaaaaaaaaaaaaaaaaaaaaagctgagaggctcttgataaagaagtgaccatgggtttagatatgatgccaaaagcacaaacaacaaaaggagacataggtaagttgaacttcattaaaattaaaaacttttgtgtgtccaagggcattatcaataaagcaaaaagacaaccaacagaatgggagaaaagttttgcaaattatatttctgataaggggccagtatccagaataaataaagaactcttagaactcaacaacaaaaaaacagcccaattaagaaattagcatgttttataatcctctgggtatatacccagtaatgggatggctgggtcaaatggtatttctagttctagatccctgaggaatcaccacactgacttccacaatggttgaactagtttacagtcccaccaacagtgtaaaagtgttcctatttctccacatcctctccagcacctgttgtttcctgactttttagtgattgccattctaactggtgtgagatggtatctcatttgtggttttgatttgcatttctctgatggccagtgatgatgagcattttttcatgtgtcttttgcctgcataaatgtcttcttttgagaagtgtctgttcatatccttcgcccactttttgatggggttgtttgtttttttcttgtaaatttgtttgagttcattgtagattctggatattcgccctttgtcagacgagtagattgcaaaaattttctcccattgtgtaggttgcctttaaagacacattcacatgtatgtttattgcggcactattcacaatagcaaagacttggaaccaacccaaatgtccaacaatgatagactggattaagaaaatgtggcacatattcaccctggaatactatgcagccatgaaaaatgatgagttcatgtcctttgtagggacatggatgaagctggaaaccatctttctcagcaaactatcacaaggataaaaaaccaaacaccgcatgttctcactcataggtgggaattgaacaatgagaacacatggacacaggaaggggaacatcacacaccggggcctgttgtggggtggggggaggggggagggatagtattaggagatatacctaatgttaaatgatgagttaatgggtgcagcacaccaacatggcacatgtatacatatgtaactaacctgcacgttgtgcacatgtaccctaaaacttaaagtattaaaaaaaaaaaaaagaaatgagcaaaggacttgactagacattgctccaaagaagaaatacaaatggctaacaagcacatgcaaagatactcaacatcattagtcgttagggaaatccaaatcaaaaccagggtgataccactttataccctctaggatggctataattaaagaaaccccaaaacaaaaacagaaagtaacaggtattggcaaggatatggtgaaattagaaccttcatacattgctggtggctatgtaaaatggtatactccctgtgggaaactggtatttcttcaaaaggttaaaaggtagaattgccatatgcccagcaattccattgctaggtttatacccaaaagaattgaaaacaggtactcaaacaaatgcttctacacaaatgttcacatcagtactattcacaagagccaaaaggtagaaacaacccaagtgtccatcaacagatgaatgaataaacaaaatgtggtatatccatacagtggaatattattcagccattcaaatgaatgaagtactgatgctacaacatataaataaatcttcaaaatattatactatatgaaggcagttagacacaaaaggacacataatgtgtgatttcatttacatgaaacatctagggtaggtagatccagaagacatgaaaaggcagattggtggttcccagggcctagagaaagtgtggaatggggagtgactactttatggatttgggatttttgtggggaaggtgaaaatgttttggaacttgatacaagtggtgattgcacaacattgtgaatgcactaaatgccactgaattgtatacttcaaaaatgtgaatttcacctcaatcaaaaactagctagtatggtgtttgacacctagcaagctaccaataaatttaaaatattattacatagtgtcacctttatcagaaatttagcttcgtgaccttggtcatcaatttcctgagctgaaaaaatgaagttgttggaatagaagacctctaaggtccttacagcattaaaattctactatattaaggcctagtgtttctaattcatacagttaatatttattatgtaacttcagagtactatgctaggcagcaaggacttagcagtaaataagacagatatagttcctgctgtcataaagctaacattctagtagataaggccttacacaaataattatttgctgagatattgttctaagtacaatgtgggacaaggcctaagagggcagggatgggtctcctgagaaaaagatatttcggtatgaagaatgagtaggagttaactgggtggagagaacggagatgagctttcagaagggaacagcaaagtctggtagtgggaaggtgcacagtgtctttgaagaactgaaagaagactaatatgaattcagacagtgactggtgagatagacaggttggctcatgtgagatttcttaggtttactaaggattttgggtattatactgagagcactgggaagccactgaaaggctttaagcaaacaatattcagtttctgatcatgtaaaaaatggtttgcaggaaggcaagtgaggaactagggaaataaagtaggaagtcattgcaatagctaagactgctgcctggaactagggtactggtagtggacatggagagaagtagttaatttgagaatgacttaggacacagaataagtctttttttaaacttaattttttttttgagatggggtcttgctatgttgcccaggctgatcttgaaytcctggcctcaagcactcttcccatcttggcctcccaaagtgctgggattacaggcatgaaccaccacgcctgtctgggacagagaataagtcttgatggactggctgtgggaaaggggagaagggtgtcagggatgactcctagatttctcttgagcatgtaagtcagtggcatgcaaagaacattggagggacctctgcttttggtcaacttggtatgtcagggactagattcaccttcttacctgaaacagtttttttaaatggaaaatatatgaaataatgattttcaggatgctggacatcaggcaacaaaggacagtaatcactaaagagaaaggtgaactttgtgactgccccaagcttactgctttgaaagaatttccaggctgtggtgcagggagagggacccaggcagaggctggtgggcttcctgagttgaagaaatggagctgagagtgtggagaggccaagasagctagagttcacaggacagcagagtaccggagaggagagggcggcacagagaaagaagagagatccacagagggtcctcctggagtatttagctgaggactgatcagcacattcatgtgagggagcttcttgaggatgaagaaagaaccatccaaaaggattggaaggaacagtgcctggcaccactgggccagtaatagtgcctactcccactggactggagaaacctcatcattcacaggacaccagggaggactcaaaaggatcttgcctctgtagtgtggaatacatctgtcaaaacataccaaactatacacttcaaatatgtgcattatcatatgtgaattatatctcagtaaagctttttactaaagaacgctgtggctgggtgcagtggctcatgcctgtaatcccagcactttgggaggcygagacaggcagatcacttgagatcaggatttcaagttcagcctggccaacatggtaaaacctcgtctctactaaaaagtacagaacattagcctgctgtggtggtgcacgcctgtaatcccagctactcaggaggctgaggcatgagaatcttgagcctgcgagactgaggttgcaatgagccaagatcgcaccactgcactccagcctgggcaacagagcaagactctgtctaaaaaaacaaaacaaaacaaaacaaaaacaacaaccctggaggaggaacagattgtaaggaaagattatgcatttagtttttgacatggggtttggctttggttgttaactggagacattgtttaggcagttaaatgtatgaatgagtgagttagttttagtgggatggtggaggcagtttgaaatggagtgaggaatgagtggaaggtaggaaatggaaacaggatagggagataattctttcagagtttgactcttaagagggacaaagggtgaaagctagtgggagaagtggagtcagagtttagttgctttaggatgatagacttaatatatatttaaatctcaatgccacgatagaagatgcaggttaatcaaatataagtaaggtttctgagagggcgcaggtgaatcaaatataagtaaggtttctgagagggtttgaaggcatagcacttagaatatggatgtgttggctttagattggaagagagctactttgtctactcttgtataacaagggaaatgagagaggatagatgaagatcaggtttgtgagttggtgggaagatgaagaggtgcttatatgttggatcccagactgcttttctgtatttctaaattacatgcagccgggcacagtggctcacacctgtaatcccaacactctgggaggctgaggcaggaggctcacttgagcacaagagtttgatattaacccaaacaacatagtgagaacccatctgtacaaaaaataattagccaggtgtggtgacacacacctgtagtcacagctacttgggaggctgagacaagaggattccttgaatccaggaattcgaggctgcagtgagctgtgaccatgtcactttactccagcctgggggacagagtgagaccctatgtatagtctgttttcatgctgctgataaagacataccccagactgggaagaaaaagaggtttaatggacttacagttccacatagctggggagacctcacaatcatggcagaaggcaaggaggaaaacatcacgtcttacatggatggcggcaggcaaaaagagagcttgggcagggaaactcctccttttaaaaccatcagatctcatgcagacccacttgctatcaggagaacagtatgggagaaactgcccccgtgattcagttatctcccaccaggtctctcctacaacacgtgggaattatgggagctacaggatgagatttggatgtgaacaaagagccaaaccatatcaccctgtctcaaaaaaaataaataaattacatgaacacatattagggaatgaggaatttattagataggcattttttggttttttttttttttttttgagacagtctcgctcttttgccaagctggagtgcagtggctcagctcactgcaactctgcaacttctgcctcctgggttcaagcgattctcctgcctcagcctcccaagtagctaggattacaggcgtgtaccaccactcctggctaattttaatatttttagtagagacagggtttcatcatgttggccaagctggtctcaaactcctgacctcaggtgatctgcccgccttggcctcccaaagtgctgagattacaggcatgagccaccacacctagcctaaattggccattttttttttttttttttttttttgagacggagtctcactctgtcacccaggctggagttcagtggtcttggctcactgcaacctccacccggaaggttcaagtgattctcgtgcctcagcctcccaagtagctgggattacaggcatgtgccaccacgcgtggctaattttttttgtttagagatggggttttgccttgttggtcaggctggtctcaaatgcctgacctcaagtgatccacccgccttggcctcccaaagtgctaggattacaggcatgacccaccgtgcccggccctaaataggcttttaattgtagaattgacaaccaaaaatttaaacataatttatgaattaaaatttttattatttatttatttatttattgagataggatctctgttgcctggctggtctcccactcctgggctcaagcatttctcctgccttggcctcccaaagtgctaggattacaggtgtgagccacgtcacccagcccacaaattaaattttttattcttaagtattcctattgtctatttgccttctaggctatcgtgcaacaaataaccagcccaaatcccatcatccattgtccagtatagttgtgcttttcatggctgttagcaatcttgagtaaaccctggtgtcagcttagaattcctaagtgctatggtgtttctaagtgagattgagggatatccaagaataaactttgctatttaagtgacttttttttttttttttgagacagagtttcactctttttgcccaggctggagtgcagtggcatgatctcagctcactgcaacctctgcctcccaggttcaagcgattctcctgcctcagcctcccgagtagctgggattgcaggcgcctgccaccacgactggctaactttttgtatttttagtagagacgggatttcaccatgttggccaggctggtctcgaactcctgacctcaggtgatccgctttgacctcccaaagtgctgggattacaggcgtgagcatcgcacctggccgtaggcttaaactttttaatacatgccgattttatagctgaaaaattatgtttcagtatttttaatacgcatttcttggttgctaataaagtaatgtttactggccacttgtttttcctccttttatgaattttctgttatactgttatagtccttgtctgtttttctgttggttgagtttccaggatttaaagatgaggaaactaagacctaaaagaagtgactttcccagggccaactagtaatttagtgatagaatcaatcatcatagcatgttaaagctggaaggaatcttagagatagagtcacaaccctgtaatataacagatgcagaaacagagggctaaagatcttaggtgacttacctaaagacagctacaaagctcattagtgacagaacctggcatctgaatcttgagatcatgaaaagggaaaggcatgttaacatttatgagcctgttaygtttcttacatgtgtatactcatttaattctcactactattctttattattcccatttaaacagatgaggtaacttgaggttcagagagcttcaattatttgcccagagtcacagttatttgtaaaactggggctggagtccaggtcttctgattcttaatccaggggtttcattgcctcataatagtaacagtggatgtctcttcgcttcactcaaatgctcttttgataaaatatgatttgcttcttggagcttgtaaataacctttatttcacagttcctgctgatactggacaccagtctgacacttaagacacttggaagcttaaggaactttttgttataaagaaaagcagatcaaggaccatcttatgcttattgggtgaatagaattgagatccatgcactacatatgacctaaattttttttgtttggttggttgttttttgagacggagtcttactctgtcgccaggctggagtgtagtggcacaatctcagctcactgcaacctccgcctccccggcttaagcaattctcctgcctcagcctcccgagtagctaggactacaggcatgcgccaccatgcccagctaatttttgtatttttagtagagacaggttttcaccatgttagccaggatggtctcgatcttttgacctcatgatccgcccgcctcggcctcccaaagtgctgggattacaggcgtgagccaccgcgcccagccatgacctaagttttttatggtagtgatagtctgtgttgaaactcttagcatttccttagaactatttttattccaaggagaataaaatcttaatatataaaatgaaaatgacatttgggttctgtgaagtgtaaaacggacctcaaatcaacaaggggtcagataggagcaaaatcgaaaccatgtcaattgcatcctccatatctttaaaaaaaaaaacaacccatttcttgacagggctcaaaatttcaaaatctatcagagctaatttggttgaggcttcatcctatggagatacacaaagattagtattgacttgtgtataactttaatgacactcttgatttggtccagttatgtagaagttagttggtaaaaactgttctacatttctgctttgcagagaaatcttgtgattgggttggtgtttttaaaacctgctagtcgcatctaaataagctggggaagatggaagagagcagcatgtgataaaatgttccttttttcccttcctatactattttgttaaaagccttctagaatataggtaccaaaaattaactcactttattctttctagttttcagtagtggggatctgttaagccttattatttaagaaatagatattaattcttatctttggtatttttctgatttgctttattgtaacaagagctgcacattaattaacacattaatcagtgcatgcagagatggttacataacagtctgagccatgaactcagtccagtattgaaaaataagtatctccagaagtaattcttattctagtatcaaacataacagtcctttaaaatttcctttggaatgttgaaaagagatcaaatgaaaccttcagaatggttatttatcagggaacaagaaacctccaatttcgttcacccattgtagctccactttctcattttaatgctcaatccacagtggcgatggtaaaagatgtcctgcaccttcagagatggcagtgggagaggggacatcacctttccatttattgcttgttgcaatttggcctgtttacagacagaattgctctgtgggttcttttagtggagagtggaggaaatcaagataggaacaagaaatcagcatttacacatgacccatgagttggctaatttttaacatgtagttaagaaatgattacagcctgcagagtcatgacctcaacttttcatcagctccattggattgtgcctcagtttggaaatgaaggaggtacacgggaagttttaattgtacctgtgtgatttatccctagtcagctctttaatttcttctggctgtctgaggtttccgacatgctgtaaatttccccaactttttcattatctgcaatttctttatgacttgtgaatcggagtggagagagagtgtggatttacagcagagataaacatgtccataaagtctgtatctgtgtcagtaattgtactgctgtcagtgactgtcctgttttacaggcctctcttgggaaaggaacaggcttcactaccagcagcactgaagtgcttgctttgatttgcattaacttgctaggagattaggtaggaatggtgggataggaattgatactggaccttggcctctcttgtttgtttgagatcaaatgacctcctaggataactgtgtgttgaagatagaacatggacagacaatattcatttcctaaatgaaaatgaaacttgaattgatatggtagatgtgaaaaatcctttctaacttcattttataatgtacctttaaggtgacttccctttcctatcactgttgataattaaacttaggttccctctggcccccctcccccattttccttttcttagaattaaaacacagggtttcacttttagagcactcatatctgctcaagagtgggccagctagagttaaggtgaagactacatctgccttatcttaattctcaactattattggctctttctcatctgcttaaggtggtgtgcccacaaccatttaccatgagaaaggcagtcacaaggagcaattcttaatataactgtctttaaaaggctctttaggatctctctctttagtgttttcttccttatagtaattttgaaagaaactgaaattaagagaagtcctttctaagtagatggaaaagcaaacacattgttttcttctagtacatttcatactcaacaaatccctcaagaattgaaactatccttgcataccctgaaccttctttgaggtagggatttgttgttgttgttgtcgttgttgttttgagacagagtcttgctctgtcgccaggctggagtgcagtggcgtgatctctgctcactacgatctccgcttcccgggttcaagcgattcccctggctcagcctcccgagtagctggtcctacagtcgcgtaccaccacgcctggctgattttttatattttagtagagacggggtttcaccatgttggccaggatattcttgatctcctgacctcatgttctgcccgcgttggcctcccaaagtgctgggattacaggcatgagccacctcacccagcctctttgaggtagtttaaaagcagagtaggtgacagaagagtttaacagtgaggggataagatgcatgataagcatcaacctatagtcagcccacaagtccaaataatatactgagcaattaagttgatttctccataagttctcgtctgcttacattcctttttgactgcaactgaccatagccatttttttttatcatgggagtgggaagattaaaggaggtgatgtgatacaaaattgtttggcatccttccagaagctgtggtgaaaagtgtggttaaaattgttgcaagaataagatttgaaattatctgtggttttaattccttatcacatctattgccatagtagagtttattcttacttaacaagggataaactactttatttgagcaagagggataatctcttcaggcccctttgtcagtcatttcttgtcctcctttagaacagggagttttttttttttaactccttaaaacattttttttaataacactttgttgagatatcattcacataccataaggtttatgtttgtaaagtttagtgttcattggtttttagcacactcaacaataaaaaactatttgggtatctaaactattgagatagttttctccttttctttttcagtccatgctaatggtattcctcatggagtaagcttgtgaaattacattgttacctaattctagtttgaggaaacttctagtgtatcacttgctatgtccaatgtagcaaacaaatacaataatctaaaattaacctaacaaaacctagagttattgtgctagtgctgtaactccttgttttaggaccttaaatttttttcttcagtgaatgcgcaagttgaaagtgcttaacattcattttgatgcagacctttattttttcttttattaattttatacaatctgattgtaagcacaggtttggaccaagttaaggagtttcacctgtatgcccagtcaatatgttgaaagaagagtgagaagtctagctgggtctgattacagaaataagctttctaattgcttaggttgaaaagcttgttattactaagaatttctcttcccagaaaatagtttgaaaggtggggaaagtatgtattctagcttcacaggggaagcatttttcttctgataggagggaaaatagtttatagttgtttgcatccatttctgctgctgtcagctgttaagttcagtaaaaacaagggtttaattagccaacagtctcacagtgttggaggaaaacgttattaaaaaagaaaagaacaatacaataaaatattatttggataataaattgtgtatctaytgttctttgaaatgactctgcaagagggattgataactttgtattaaaggtttaataaatataggtgctggagaatgattcaatcacatgtctccaggttgaaagaggaccagcagctgccccccttaatcagagtgagaatggaatccagtagtagccaggcttgaaactaaagggagcgttagagtattgatctgtttacttgtagaagggataattattgggttaaaatccttatgtgatgttttactttttaaaatcccggatttccttggaactataattttaaaaacttatttcaaattatcaagtaaatgaatatcaatgccacaaataggtcaggaaagaagcccctcttcactaaattaagaagaaaagtcattaagtcttcttttcctccaacagttcattatgaaaaaattttaatcacccagcaaacccccctctgtgtgtgtatattttatatatgaatatatatatatatatttttttttaatctatattacgtattgatattctcttcttccttagccatttggaagtaaatttcagacatcatggcactttacccctaaatgcttaagaacacatctcctaagaataaggatagttttctatataatattatcacatccaacaaaaataatttaaaaaatctaatatattttcacattcagacctccccaattgtccctaaaaatcttgtgtagcatttttattaaaaccaagatccagtccaagttctggcattgtaaatgccattacattcttgataagagaacattgagcactaaattctgcacagcagctctcttttttttttttttttttgagatggagtcttgctctgttgcccaggctggagtgcagtggcgcgatctcagctcaccacaacctctccctcctgggttcaagtgattcttctgcctcagcctcccgagtagctgggattacaggccacgcaccaccatgcctaactaatttttgtatttttagtagagacggggtttcactgtgttggccaggctggtcttgaactcttgacctcgtgatccgcctgcctcagcctcccaaagtgctgagattacaggcatgagccaccgcgcctggcctcacagtagctcttttaataaatatttaccagctttttcctgtggtgaacatatatttactcaaatgactatcattttcttctagaatattgagttttgagttctctctttacaataagcctgctttatcaagctcctttatttctggtatcctctccttcttccaaatgaattacctgtagaattgatattttctccaataactactctattccacagtcagagtaatatttttgaaacacaaattgacatgtgaccttattcccttcttcttaaaatctgtcaacagcttctcattgttctcaggatcaagtcaaaaacctttaacttggccttacagctctgcctgatctaacgtttttcacaccatgctccctttctgagcatgtgttccgcacattcagaaaacagagggaaaagtgaggtaaataatccagggaacacctcttggaagagatgaaacttgaaatagaatttgatgtctaatatttgtatataagaggaaagaatacacttcagaatgggaaggaatttttgagaatggataagatattttgggggaaaattgataaattgtaacagactagagagatgagtcaaagtgatttcaagattttaagcccttgtgactaggagaatacaatttagtgtggaactgagatatgcattataaaacttcagttttgtttgctaaggtgttgttaaagcatctttgaaggccaacgtggcatgatcacttgaggccgggagttcaagactagcctggacagcatagcgagtctccatctctacagaaaaatttaaaaattagctggtgaggtggctcaagcctgtagtctctgctacttgggaggctaaggtgggaaaatcacttgagtccaagagtgaggctgcagtgagctgtgattgcaccctcaccccaccccctatcctctgcactccagcctgggagacagagtgagaccctgcctcaaaaaaaaaaaaaaaaggcatctttgaaatgaataacttaacaatttaaactactatcagggttatataggtgaaaaggttgtgaatatatagtctgttaattatgataaagtgcaaccatatataacaggaaatctaaaataattgtggcttacacaaggtagcattttttttttttttcaacaaaaaggaaagctggaggtagatgcacctagcaggtagggcagttccaaaggtgtcatcaaggactaaagtttccatccttccatcctaaatatactttatacacgctagagctctagccatcatgcctgaattgtaggcaagaaggtggggtaggaatttaatttaaaaaagggatcccacacagctgacacttttctttttaagcagccttcctggaagtcccacagaatttaaatcacctggcctggctgcaaaataatgtaattgtttattctgagctataattttggtagcaaaaaagttggctatctgttaatacagaggaagagggaacatggatcttggaataggcagccaatattctctgccatagcaggggacaagagacctttgcaagagcagtggggtcagtagaaggatgtgaggtgatgtgttgagaaggaagctcagaattagtgattttacaggtgcatgtatggacttagtgatcttgttttctttaccacattaagcttgtttggtgctccataaatgggtgactgcgtgcccaacatctcctgttaaaggatcttgcagacctttttttttccccctccctttggctatttctccaagtaaataaatattagaaaatatcagctctttttcatcttcagggaacaagccactcaagaaatggtcagtttttaaaattgctgagcagaacctgctatagatatttccagtatggagaagagaaacacttggatttctgatttstgtatgtttaccaaaacagattctaagatataagaaaaatattgctagagtaatattttcttttatgcagctagcatagtgagtccaagagtttatttttatattcactgtgtttcacataggcttgattataataggctattggtgttgttgaatggatgattgaattatttctgaagcctgtatgaggtagactgtggtgatatttagaagttaaaggcagtctatggtttaatgtaataaaacatgcttcatagctagtaaaaaagctatcccttttataatatatagtgtatagattatataattaatataaagccacaatagctttattactaatttaaaatttaactcctaagaacacttcagcaaaaacacaaaaatagattcacttaaaagctttttaaaaataacttagcccaaaacaccaaataagtctagtagagttttgctgctttaaatgtaaaaagcagcattttactcttagtatttaaaggcgactccttaccttcttgtagcactttgtctactgcagaatgtgcatgattttgccctagttatggtgactggattctcatcctctcagtaggatcaatattaagctagccttctttacctcctcgatccatattaaacctgtcttggaaagagtctgtttattggataatatagctacaccggggctctatgacaatatcttttgctgcctcattaactctcgagcattagaacaagataaaaatgccctaaagcctcttatctgatgtctggtgtaacctgctgtaagcaggattgccattagtttatgttagaaatcaaatgaccctctccagtgcaggaagtactgattaaacctgaagtgtccccggaggactctacagctgtcagaggggtggtgactgtccgtcacgaaaagggaaatctgggccagaggtcccagtggggcggtgctttaagaacccgcacgtggctgccccagctgttctgctttgcctaatgaattgttttacaagaagaggctgggtattatcatcacaagctgccttccttagggactggagcaggccaaataataagtaatgttagtgatggtaattgaaatgtgatggctctcctgagatctttatggccctggagctggttggcacttgtggattgccttgtcctagcaagtgccttattttttttctgttttgtaataccgttgtgtgcgtttttctcttctgtcccccatggaaattcattaataaaagctatcgtaggaacattacaatgatgttaactacaaaaggaacagttttaactttttcatttcaattatcaaacactgtaatggtaaataagtggtttctggaggaaaccactgtaaagatctctctgtgcttttaaaggaatatgttaaacttatacaaataatacaagctcttgattttaagaatattttaaaataacatgaaaggatataaagtgaaaagtaaaatccttatctgctgaatttatgagcggtaactgccacgaacagtttctccatggatgcttccagacattttctgtacatagtaaagtttatatacattaccatacacagatgcaatcataatatacatactgttttgtgacttatctttgaccccacaacatgtcttggatatctttccacagcagtatacatagatctgcttcactgttttccaaatgcttcataggatttcactatatggatgtaccaattcaagactctttgtagatagtttgacttggaccttataaatgaagccttaccatacaagcaggttgcatccactgacttgtgttccatagttcaaactctgcttttacatgaagtgattttcctttcttcaggaatgttacattttagtccagtattgttttaaaataggaaattctggaggtaaagcttttaggggggaggtagtgtgagtcttgtcatgcatcattagccggacatatgtgtagtgatatgcaccccactgtgtgcttttaatttgttgcttagttaaatgagaagtattctgtcccagataggtggggaaaacaaatagcctttgatgagtgttgtccaaggcactgactggcggcttcctctaaagttgaatgagtgttttctcccctaattttctacttcagaagttccaggaatcaagttttgaacgcattaatggacttgggaaatgatttgtcagcacgtggaaatgaggacttaggtttcttgtgtaacagcttggctaacaaagcaagtttgtgcctcatgaactttaagggccttgctgggagtggcagtgtgatgaatgaagcaaagcaattttccaggagcatttcaggtcagtgataggagaaatcagttgtcttctcagtcaaacagaaacttaattttagttgcatctgtcttaataagagaatctgtatgcaaattgaatggtagaaattccacatctgccaaagatgggagcattgcaagtcttttttttaactcgaagctctttagtcccattctcaacacttcaaaattgaggtttgaccaaatattgaagagatgtcatactactaaattgcaaaatgcaaactagttttgtttcagacattttatacagtgcttttcttgtccttgatgttagtcatttgaattgatgcccaatctttaatttaataattggaggctattattaataacaataactgatttacttcttgtccaagcctttattagattcatgggatgtaggtatacagagatttctggggctgttctgggctattggagatcttgtagacctaaactattcaaagcagtagccactaactgcatgtgtttgtttgaagttaaattaattaaaaataaaatttaaaatctaattcctcagtcactctaggaaatgctcagtagccatgtgtcgctaatgactaccacattggacagcactgctctagaccaaaggtcagcaaactatggcctgcaacctgtttttgtattctctgagccaagaatgttttttacgtttttatgggggctgtaaaagtaaaacaaaaacaaaaaacggaagaatctgaaacagactgaatgtggcccacaagcctaacataacatccttacgtcccattcatacttatgttatgttaggcttgtgggccacattcagtctgtttggttctttacaaaaaacctttgctcagccctggacctatgcttcctcttggtgacgttttggctttctgatcaaattgggttaggactttccataagtcatcagaagactaaatctaataagcaaatagacaaatttcagataaagtttcttactatagatagactatggaatgagtccagagcatacacaaatcagttccctgaagctaggacaagcgggatgtgcatttgaaataggaaaatagtttatagtataaattatcaatttcctacaagctttgtgcataacacctatagtttaacagaacatctttcttattttgtacactattttgtgtcttctgtgttctatactctcctatcttactctgacagaaacagaatgagcctgggcatagtggcttatgcctgtaatctcagcactttgagaggccaaggtgggaggatcacttgaccccagagttcgagaccagcgtggacaacatagaaagaccctgtctctgccaaaaaataccaataaaattagccaagtgtggcagtgtgcccctgtggtcccagctacttgggaagctgaagtgggaggatgcatttgagcccaagaagcagagcctgcagcgagctgtgattgctccactgcactccagcctgggcaacagaatgagaagcctctgtctccacatagtccgccaaaaaagcagatgcactttttaacaaagaatttactgtgaggttttttttttacctatacaaattataattttttcatatttttaattgatacattataattgtacatgtttatggggtacagtttgacatttcaattcacatatgttgtataaagatcaaatcagggtagctagcatatctattaccacatgcatttattatttctttgtggtgagaacattcaaaagcctctcttccagctatttcataatatgtgataccttactgttaactagtcaccctgctgtgcaacagaacaccagaactcctgtataattgtaattttgtgcctgttgaccaaactttcctcatcctcctcccctgccctcttctcccctctttccagtttctggtaaccactctgcttctatgatctcaatttttttttttcttacaagattccacatatgagtgagatcatggcagtatttgtctttctgtgtctggcttatttcacttaacatgatgccctccagtttcaaccatgttgtcacacatgacaaggttttattcttcaattttttttttttttaagacagggtcttgctctgtcacccaggctggtgtgcagtggtacaaacacggctcactgcagcttcgaccctggggtcaagagatccttccgcctcagcctcccaagtagctggtgtgggagccacacccagctaatttttttttttttaattggagccatgggggttgggaggggtctcactttgttgcccaggctggtctcgaactcctgggctcaatcaatcctcccaccttggccttccgaaaggcagggattacagatgtgagccactgtgcccagcctcaaattatttttaaaccatcacattatttcagtctctcctagggagaatgcagcaaaaagattctttttctggtattctcaacatctgagagattgtcttcccttagcaaatgtaactctaacaaattcttattaaatatraggtctatgaaatctacctataaaatgagcacctggcacttctgtggtaaattagagagtcagcttgtcgctttcaagacaggaccttgacattcatgaggtaactgcaaatttccaagtttgtgataactcatagtgtatcatttttcctctaaaatgtggtaaagtacagttaaaaaaattgttaccgtttgggcctttggtatgaattattctataattagaagtaagtaaagtattctcccactaaaataaatgttacactgcaatatgtttaattacaaatagaaatgttaactggaacttgtctgaatcttcaaactcaacatgtcagatgatcacgggttgtgtggttgagatcatgaagtgtgtactaagccacaaaaaaagtgacacttcaacaataaccttgaaaacaaggcacgtgatagaagagataagggagatcattgtgaaacagtattctgagagggaacctttgtgaagtgatcgcttctttctaaagaactctgagtggtagctgtagttggcttttattccatggtatgaaatcagtgcagattttaacatttaaagctctatccattgatcataagcagttatggtgtcaattagctgtttctccattagaacgttgactaaatgtatgaaaactcaaaaaagttcttctaattcttcagtgtcatcccctttgccattctttgccaactcatctgtgagtcttattgttttttcagttcttccatattactcttatgtgtgccctccaaacctttgccaacctcttgcctctccagtattaacagtgtattcttcattgcctgtgaaaataatcttaaagttatacactgccttcttccttacagtatgccagtaagcatccacttttgtggatcacctgatttgtagtaaaagattctctatggaatccttacataatcaaggatgtacctcttctaaagctgcctgttaataagtttgctatctttgtccatggcattttttgatgacaatgaaagtgtggcaaagtcatatgctttgagcttgtctcttacagtctggtcgaaaagtcagaagtattcagaggaaggaacatcacttaaggatttagaattgtaaactatagtaattaaagatagccttccacattttccacagtagggagaacttgaaattcaagcttagacatttctggcacaaagtgttttgtttttttgtttgtttgtttctcggcccttctaagagacaaaacatgaaatgtttttgaaaccagtccaaaacaccttgccctgtgtctgagggtgtttttttccactggactaccaatatttggaaagacattcctttcatgtcttggggttttcagattggtatggaaaacttgttttttcataaagactgcagattctatgacgtgaaatagtcaagtctgatcttaaactccctcatagagctctgtgaggatatctaggtatttgcaggtttcaccactgaattcccaacatttaccatacttggtacataatagataggtgcttacttttcccctttcattattttttcccaaatcacattttggtcatgaatcccatgtttcctgaatcatcctcactgccttttcagagaagtatgtatttttctctctattgatgaacatgtttgataaaagctgggatacttgttaaaacgttcccacacacggctggatacmttatggaactattcatgtcatatatctgtgccaaccrtaagaaaaatatgccttccaaattcctttagttctcttcagtttccataaaatgttatttttatcatgtgtaagagtactgttagggaatctcgtagccatggtgggatgcaggtactgggtggaccactaggttcactagccagctaagtgaattgctcttccagtgtgtgctgttcagatttgttcctaagcaaaattgcagataaactcctgtgttacattgactttcatgccttcatagtagaaagcccacagatattaaagacttgaattcaggtactagtaacaattatagattgattgttcagaataccttggtttccttcttaagcataaagtacagaaaaatcaacactgacaagttaatcctaaaaatcacatggaaataattgcaagggacccagaatagcaaaacaatcttgaaaaagaacaaagttgaaggacttacacttcccagtctcaaaacctactacaaaattacagtaattaagacagtgcagtagtggcataaggatagccatatagatcaatggaatatgattgagaatccagaaataaacccccatatttacagttaattggtttttgacaaggacaccaagatcattcaatgggggaaaagtagtctctttcaacaactggtgctggaaaacaatatccacatgaggccaggcatggtggctcatgcctgtaaacccagcaatttgggacgccraggtgggtggatcacttgaggtcaggagtttgagaccagcctgaccaacatgatgaaacctcatctctactaaaactacaaaattagctgggcatgacaacgcacccctgtaatcccagctacttggaaggctaaggcaggagaatcgcttggatgcctgaggygaaggttgcagtgacccgagatcgcaccattgcattccaacctgggcagtaagagcgaaacttcatctcaaacaaacaaaatatccacataaaaaataaaataaaataaaattggaccctctacctcatatcatataaaaaattaactcaaaatggatcatggacctaaatataagagctgaaactatagaacataggcataaatcatgaccttgaatttggcagtagtttcttagatatgataccaaaagaacaagctccattacaattaaacacttctgtgcttcaaagacaccattaagaaagtacttgggtaggacaggtgtggtgacttacgcctgaaatcccagcacctgtgttcatagtagcattattcacaatagctaaaaggtggaagcaatccaaatgttcattgacaggtgaatggataaacaaaatgtagtagatacatgcaatggaatattattcagcctttacaaaggaaggaaaatctgacacacaaccttgtgggacattatgctaagtgaaataagccagtcacaaaaaaacactacgtaattccacttatgtgaggtaatcagagtagtcaaattcatagagacagaaagtagaatgggggttgggaggaatgggggagtattgtttaatggttacagagtttcagttttgcaagttgaaaaagttctggagattggttgcacagtgatgcaaacacacttaatgccacactaaactgtacacttaaaaatggttgagatggtaagtgttatgtatatttcacaattttaaagtgggggaaggtgacttttatgctatgtgaattatatctcaagtttttaaaagttatatgggaaaagaagaaaaaagaaaacaaaacctatctaggaagcccagaagatttgacagtctattataggcctgctcctaatcaaaggcctttttttaatgtgtagtgattttatattccactttcctcaattcatgaataagtcccttctaactctcctcttccctttattatttcgcaaaatagattggaaataacctcctgatcctcctcagtacttatgttaacatctgggaccctaccaaaggttcacatctatttcttaagattttgatattatcataataagtaaatatttattatgtaaaccaatgtgctagaccctgggtgtcaaaaatacataagctcctctcatggcacttacaatctgactagagagacaaggcaaatgtataaaaagtttgatcacagtacaagagagcatgtactgatccacttgaggagcatagaagttgacagaaatgagagattacagtaggctaaaggtgtttggaaaaagtcttataaaaaaagtgggatataaacgaacaacaacaacaacaaatcctacatatcaacagtggcaagttggtttccttcttgctgtaagattccatgtaaaatgtagtattttatatagcagttgctatttgattaacctgcaaaaattatttttttctcatattcatttcccttgttagtatcccagtttgttaggttagacagaaaaaaaaaattgcttgattgtctattcctccacatatagatcagtatgttaagggggcgaagtaactttacatcataatttggccactgggccatgcaacagcctgtctagctttaccctgctaagcctagaagtggcaacaaagagataagaaagccaccatcaagtgtctgtggcctagtatgaatttgacctgcaccttgacaatgattttgatttcagctttccatggtgaatggatttactacctatcagagtcacaaaaacccttaatttttaaaatattttggggtttttcttctacatgttaaatgttaacttcctgtgacaggcggtgatgatttctgaattttcagtgggcacaactcgttattgaagcactgaagtagttggttactattgcagctaattcttatttaaatgagcaagagttctttggaaagattaggcagcatggttttaaaaattcacagcaacactgatgtatatcagttttggcttggcaggctttgacccagggccgtgcagtgttttataaccctcagctacataaggacacatacttatagcatcacttttgtagtggatatttttataactctacaaaacgattagactgacgtaaagcaattctctaaattcataggtattaaaatattctggcagctgtctcctttttgcctttaagttgagacatcatgatgagataagactgcaccaggcctgatcggtacatgaatgaggttatgcgtggtattctcacattattgacaagggtctttgtcactataaataggagaaatctttggggaggggttgccattatagtaattccgattcaattccagcaatattcttgtttttcataaacttttttccttcaaaacacattccatgcaatcagataagaaagaatgatataaaaatgcctttgaattctaactaaaataatttagcttatagttgaaatatataatatctttatctgggagtctgaggtattgattagggttagagaatgtttaggagaacctggatgaaagaaacytactggtaaattggctgtaggctacagtgacatgggatacagactcttctgtttgcaaaatagtcttctaccaactcgtggattccaggtcatagtcctcaagggggaccaagagtctggaaaggtcttgtgttaccatcttagcagctctctaacctctctttccctaagtgcttcttactgcttctaagtgtctcaaattcttttaactgagaacaatttatagttaaaagattgtccccctgctgagaaataggaggctttaaatggcaagtgattatcagtacaaccattttggaaaacttaggcggtatctactaaaactgatcatacctctaccctatgcctcagtaatttttatgctatgtaccctagaaataggtatgcatgcatttgtgtgccgaaagataaagatacatacaaaaatgtttggagcagcagtatttataattgacccaaactagaaacaacctcaaatcaattggcagtagaatgaataaataatgcaaaaatttattattgataaagaacatagtagaatactgtatagccatgaaaatgaaccagctcttgctacatgcaacaacatgaatgaatctcaagaatatatataacattgaatgatgaagctagacacaaaagagtttatattgtacagtttcatttctataaagttcagaaacatgcagagctaatccatggtgatacaaatccaaataatggttgcattggggctatgatgatggctgggagggggcctgaggaagaggcttctgcagtggtggtaatgattctctatgtacctatatgtggttgttacacagtatatttatgatttgtacatttttctgttcatatgttatacttttttaaattaactaaaaaaaatttaaagacaaatagtgactgagataaaaatgaaaatgaatacactctaagggctaatagccagtctgaccttaaattgaagtggtagcacttaaagcctttctggtttgatatgggaagctcatgaaaaaaggatattgagcatcagtagttttccagccagttaggaaaagatgttgaagatgaaggaaaccaaccctcccgcccccctgctccaagctccagatttcaaaatatttcttgagcaggccttatataatgggatacgagtagctggaattgttttcgaagatatwtttgtcatgggcagctatgaatgtacacaaccttttctgccttagaggtttgttttttaatataaacctccttaaaatacaatttttatacccagagagtcattaattgaggtcaccggcatagagaaagggtggtgatgaatgtgattcagtagatggcagtattccctttgaagtttttagttaaaatgtgggtgtactggggtagcaacttttttcggtgggaatgaagaaaagtcacatactgggataattagaccagaaagaacattttattatttttttccatttgtggtattactattgtgaatgaagcaataataaccacaacatacagagtaagaggaagtttgtttaatgtagtattcctttaagtgggaattattggatagaacccttggaaaggatttggccagtgtctttttttcctgtcatatatttaggaagattgagataatgactaactgctttatacaaagatgtcagtgaaatttattaatgaggtgattaggatgcagttgagcagaaattaaaagaaaaaagtgattgaccagtctgtttttgctggttattttaatataaatcaaatgctatttgaatagattctcttttttaatgttgaaattgtcttataatagtagtgcttggtgggctttaagactctttgccatacgggggttttaattttaaggaatttgacatcgattatagtaacatgccatagaagtcaagagttatcagccagttaaaaggacgaaacatggctatcgtgcagaacaagagatcaattaacaaactaatcagttggagtcagaagaactacatgcaagtcctgactttgctccttattaggtagtgaccttgggcaaatcacttaacctgccattttttttttctcatctatgaaaactataggtgataagtaactgctgtgccttccccacaggttgttaagttcatcaaatggatgcattgtcttaaattaagtgtgctgttgttaggcagggcgaggtggctcacgcctgtaatcctaccactttgggaggctgaggtgggcgaatcacttgaggctgaggtcaggacttcgggaccagcctgtccaacatggtgaaaccccatctcyattaaaaatacaaaaattagcctgacatgatggtgcatgcctgtaatcccagctactcgggaggctgaggcacgagaaccacttgaacccaggaggcggaggctgcagtgagccaagattgcaccattgcactccagcctgggtgacagagcaaacctccatctcaaaaaaaaaaaaaaaagaatgctgtgttaatggtgatggactctacagatgggctctacattgtttttatactgttcaattaacttttgtttcctcctgttctgcctatagtcatcaggtgcttgctaagaaacattgataatcattgcttcaatagccatcattatgagtacctactaataggtacttcattcactaagtgctttaggtacatagtctctaaagcctcacaacagccctgtaagttggaacattgtcgccattttacagttggcaaaggtctggactagcccaagagctgtgaatcaatccaagccatctgactccatagcctttgcttttagtttattatgctatgcctgccattatgcacttgagttttgacttttctgtatctagtattttagaagccagggccagctgggcgcagtggcttacgcctgtaatcccagcactttgcaaggccaaggcaggcagatcacaaggtcaggagttcgagaccagcctggccaacacaatgaaaccccatctctactaaaaatacaaaaattagctgggcgtggtggcacatgcctgtaatcccagctactcaggtggctgaggcaggagaattgcttgaacctgggaggcagaggttgcagtgagctgagatcgcaccactgccctccagctggggcaacaaagcaagactctgtctcaaaaaaaaaaaaaaaaaaaaaaagccaggaccatagatagtatttttatgtatcagatacttaaatgaaagacactgagccttagtggaaaaatttattattatatttccctttggagttaacagaatcctagtgcgtgcaattactaatttgggagtgggaggagttgtgctcctgacctgagcctacattttatcattaccakagcacatgcagattgtttcttgaagattcagacaaggagaggaacacagtaaaggatgtaaagaatgttaatgtctggtttgaggatatgttataattttatttgcagatacccctcccaactatattttaatgttagaactagttttttctttgtgtgtgtatgctttatggcggtttcccattcattgtaatagtcattgatattttgcatggggttatcttctagagaatacatttaaaactggtaactaaatatgctgataactaaatacatttttgctattcatattaggttaaaaataaataagtatatatgaacattttcatttataaacatgttgtcttttaatattccaaaaatattgtttttaatggaaaatgattttttttttttttgagacagaatttctctctgttgcccaggctggagtacagtggcgcaatcttggctcactgcaacctacacccctcaggttcaagtgattctcctgcctcagcctcccgatagctgggattataggtgcccaccaccatgcccggctaatttttgtatttttagtagagacggagtttcaccatgttggtcaggctggtttcgaactgctgacttcaggtgatccacccgcctctgcctcccaaagtgctgggattacaggcgtgagccaccatgcctggcggaaaatgatttttttaaactctatcttctcttgtaaaaacataaaaattatttgtgttttggccagcttctgatttagtttgtaaattgtcactagttgtttttcaataagttgtaaattttagaatatttttaaatttacaggaaaattaagaaggagcgttcgcatataacccacatggaatttcccctgttgtcgttagtgtggtacatttattacagttaatgaaccaataaagtccatactttattcacatttccttagcttttccttaatgtttttttttttctgttccaggtcccatctaggatactgtattacatttagttgtcatgtctccttaggcttatgttggcatgacagtttctcagactttccttgttttttgatagccatgacagttttaaagagtacagtcaggcacattgtagaatgtccctcagttgggatttgtctgatgtatttttcataattatggtttgcctttcactacataaaccaggctatatgtggaggttgttcttaatcataatgagctctataaggaaggcagattaggattttaaaatattggctgtggttaaccaaagataaacattaacatcattctttgttggatctgaaacactggctacattttttatattttatcatttttccgaagcagccagtcctaattctggctagaagtaagagtctaggttatatgatctgctcatatccctgaaacagtttctttcctaattgcacctattggggcagttgggatgggttttaatgttactcctaagagctttatttaatctgtattggccttttaattagtaatgggcaattttgggtgaattgctaattgattagagttgcggaaattatccacaaagctgttttgtccctgcagcctagaagacgtaagattaaaacaggatcgggtttagttactagtgtaagatgaatgcttgaaaagtattattttagtggctttggtttgtgttccggcctggtgttggttttaactctgctaagaattattgtcttttaactcactgaggtcctcaattctactccattaagggccacttttctgccaatcaaaaagcagcatccctgagattgatttttgttacagtgggtagtaatggctgcctagtgacaacatttcaaactcttttatgtaaacagaaagcaatcaaataagtactaatccaaggattatgtggacccaaatcctgtggccaaaagaatctctgcagtgtatgtctctggctctttgccttctagtgccaagcagcccctcttcttcctggaaagcttgcttgttgcttgtgctgcctgttagatttcagtgtgctaaaaccaaaacactcctgcagctcctgaatgaaattcaaaaagacacttacatttccataaataaattaggaattcagtggtttctttgggctaatcagggcaggctgataaaccttgctagctgtttaataaatgaattgtgacctattaatatggacgcctcaggaattcaccctggtggaagcagagcagtgaaatagagaggggcatggccccttgggaaatcagggcttcatgtttgcagcttaaatatctctgtgaagtatcaataaggaggtaattgaattttgaacacaaacatgagcgccggatggatgaaagggggtgggggatctgatcgtctcttctctgccccttcattctcccctccccttttccttggagaccactcyagtaaagatagatgctaaatccattaaataaagattagactcsgtcgtagtagaaaatggcagcttagctagatccccaggcaaattggagccttttgcaatacagaaaattaaaatatacatttttaacaagtgtgctatcttcctagcaataatgctaggctagcttgtggggtttactcctccttcagattggcttttgtttgggcagatcactttctcttgtattaatgccaatcttttctgtattcctggaacagaagggactgggtttatttatttatttttaaagcttctgttgaggcctttcctctagcatcctgcttgcttgtaatcagaagagtgggaaggagattagtgtcccatgaattgacggtagataaatgttccctccccttcactggtgggtccagaagagcccaatcacttgtatttcagggatgactggagactgtacagccaagcaagaaaagggcttacagattgaaataaacattgatgttttagatgcaattttacttggctttatttcctgtagataaggttattgatttgctttgtcctcctattttaagccaggtaaagtcatattaatgtaagaaaaaagaattggcattatttggttacagatcataatactccttttttagcaatagcagaaaacaaacatcaagccttaaatgcttttgttatgttgatgcgaatgcccagtattgttttttttagactaacccttttttacatgtcaatctacaattctaataaccctttcctatagtcagtctgtctatcaacaagtataaattgagcatctgttaggtgtgtagcatggtcaatggtgagaaaagtctatcctctactaccacagttacttcttttctttgttttttatggttttgttttttgtttgctttcattgtttttaattgacacataataattgcacatatttgtgagttatagggtgatattttgatacatgcatacaatgtgtaatgatcaaatcagggtaactagtatatccatcacctcaaacatttatcatttctttgtgttgggaacattcaaaatctgctcctctggctatttgaaaatatacaataaattgttgttaattacagtcaccttacagttgtagagaacactagaccttagttcccctacctagctgtaattttgtatccattgaccaacctctcccatctttacctctcccctccccttcctagcctccagtaaccactattctactctgtacttaggagatcaacttttttagcttttacatatgagtgagaacatgtagtatttatctttccgtgcctggcttattgcatttaacttaatgtcctctagttccatccatgttgctgggaatgaccaaatttcattcttttgtgtggctaagtagtatttcattatgtatgtataccatattttctttttcttttttttttttttttgagacagaatttcactcttgtcacctaggctggagtgcagtgttgccatctcggctcactgcaacctccacctcccaggttcaagcaattctcctgcctcagcctcctgagtagctgggactccaggcatgtgccaccacacccagctaatttttgtatttttagtagagacggggtttctccatgttggccaggctgatcttgaactcctgacctcaggtgatcctcccgcctcagcctcccaaagtgctgggattataggcatgagccaccacacctggcctccacattttctttatccattcatctgttgatagacacttaggttgattctgtatcttggctaaccacagatacttctttgaaaacaaagtgaatcatggcatactcctgctatatatatatatatattttttttaattaatttatttattttagagacaggktctcactctgtcactcaggctggagtgcagtggtgtgaacttggcccacctcagcttcgacctcctggactgaagggatcctcccaccttagcctcccaagtacctgggactactcaccaccacacctggctcattttttgatattttttttttctgtggagatgggattgctctgtgctgcccaggctgggattacagggatgagccaccrtgctcagcatactcctgcttatcaaagttctatgtctccttgggtcctacaagataacattcaaattctcaggctttcacaaagtgccttcctgacactgatccaggctttccgtagtgtcatcattctatgggatctacacctgaggctctggggatttcctatggaagaacaaatgtggaacttcttggtctcagattaagggctttgtgcatcatttgccagatggtgtttcaaatgttcacaattctttctttcaacttcaggggtatattgttgttcagattttcaacaatttgcccttatgacattcactttataatttaactttgtttgcagcaatggaggaaacctttcttgttaagacaattaaggtgtctatgctttctatcatcactgctatatatatatatattttttttttttttgagatagagtctccctctgttgcccaggctagagcacagtagcgtgatctcggctcactgcaacctccgcctcacaggttcaactgattcttgtacctcagcctcccgagagccaggattacaggtgtgcgtcacatgcccggctaatttttgtatttttagtagagatggagkttcaccatgttggccaggctggtctcaaactcctgacctcaagtaatcctctcgcctcagcctcccaaagtgctgggattataggcgtgagccaccgtgcgtggcccgccccctactgctgtcgtaagttatttcttcctttctttcttttttatttttatttatttacttgttttttatttatttttgagacagagttttgctcttgttgcccaggctgcagtgcaatggcacgatctcagctcactgcaacctccacctcccgggttcaagtgattctcctgcctcagcctcctgagtagctgggattacaggcatgtgccaccacgcccggctaattttgtatttttagtagagatggggtttctccatgttggtcaggctgttcttgaactcccgacctcaggtgatccgcccacctcagtctcccaaagtgctgggattacaggcgtgagccactgcgcccagycgtaagttatttatttctagagatcagaaatcgaatttatttaactctatcaccacagttcacaaatggcccttaataattttgaatgctattactyaaagccaaataacacaaaatttcagaattttcttgcaacttcttatgttgcaagttacattgatgttatatccagatggttataattttcctcccaggtctctctaatctctgcttccaactgtattgctgggcctcagagctctttccaacacagggttcctggggccacaggagacaaacatttaaaggctctgtattcctagtggttgggtcttaactattataaactacatgttttaaatctaatttaacattagcagattaatgcaagtgaaatatattttcttatttgtattaattatattcagtatagagtgtatctttttatttaattacaagatttaataccagaaattctgagattaaaaaaaaatcttacccaagttctccctacaatttttaaataaaatagtgtcattggctttattcttttaagagaagatctcttggtaattctctttcctaaagctttctggtgatcttagcataaccttcattcagcaaaatatctcctgcctgcctttgtatatacgtaacagagtaccattagaattatctgcagtataatgttactacttacacaattactgatttaagtttctgtacatgtgtggataaatgctcaaattgtytgtcttgtccaggcagattctgtagccatggttcttaacctagagtcctcatatgtggggtttgttttttkttttttttttttggtgagatggagtctcactctgtcacccaggctagaagcagtggcatgatctcagctcactgcagcctccacctcctgggttcaagtaattctcccacctcagcctcctgagtagctgggattatagacatgtgcctccacgcccagttaatttttgtatttttagtagagacggggtttcaccatgttggccaggctggtctcgaactcgtgacctcaagtgatccgcctgccttggcctcccaaagtgctgggactacaggtgtgaatcaccgtgccctgcctacagctgtctttatgaagtgctatgacaaacataccatacagcaagcgttctcaactttggcaccattatgaaattgtgtttgtgtgtgtacatgtataattttcagcagagagtttctatgacttttatcagattttttaagagatctctgttatggattgaattttgtcccctgaaaaagrtatgttggagtcctsttccttatttggagataggctctttacagaggtaattaagttaaaatgaggtcattgtgtggggcctcatcccaatatggctgaagtctttatacaaaggaaaagtttggacatggagacagacatgcatagagggaagacagtgaaaagagacacagggagaagatgccatctacaagccaaagagagargcctggaacagagctttgcctcacagccctcagaaggaatggacaattctagcattagctcaagctgctgtatgakgtacttgtgtgaaggattatttatgggcccaaatacccttctctctataggagtttataatctctatagactaaaaggaattaggtccccaaggttgctgccgttcttagcctagatttaaaaacctttaatttttcactattttatgtagttccatatgcatatggagatttcatgatcattaggtgaaaattactctttaaattaattattcatagtaaagggaaagggtttgccttttgaaaaaagtatatcttttccatttttctaagtcttctacagtttaggccatacyggttttcagaaatcccttctagttaaagtctactaaacactaactaacttactctttactttctcaagcactaatggaaatactggattataaccaatctaatactctctgggcatttctactagacactttgctcagtgtgatttaaggcagtttataatcactccttgtggtcttgaggccagttttcaattcatgagactcatatatcctagctagttttaattaattttgcaaggaagatgccaggagaagcaatattaaatgctttcttataatcaggttatttcatcttttgcgttctcgtcagccactaatcttgtaattttatcttaacaaaatacagaasttgctttgacatagtttgttctttactcwtcatgtttttcagtacatagaacttatggtttgggtaaccttatattcatgattgtcttaacattaggatttggggatagaccttaattagtatcacattgtgtttcatatatttggtcttttagggtaatcatattagccaagaacagtcaggagtaatttgaacagggaaaaatttatttatttatttatttatgacagagtctcactctgttgcccatgctggagtgcagtgcatgatctcggctcactgcaacctccgcctcctgggttcaagcgattctcctgcctcaacctcccaagtagctgggactacaggcatgcaccaccatgcccagctaatttttgtatttttagtagagatgagattttgccacattggccaggctggtctcaaactcctgacctcaggtgatccaccctccttggcctctcaaaagtgctgggattaccggcgtcagccaccgtgcccggtctgaacagggaaaatttaaaataaaaaatgttaattaggtgaaaggtggttaacttctgaaaggaaaagaagagtcaacggtgtacagaggtagcagaaagctgctaacccctaggactgaaggagagtcaacagaggaacttagtggaggtccccacaaggctgaggttcagccctctgaagggaaaacacatggccacgggaacactctgccggtgcattgccggagcagcccacctgatggcagtgaagaatctttgggggagggagccccaccactgaactgtaaggactgccattgccaaggtgaacatagctgagaccctgcacgccaacctgcttgtcgctgcacagaagagccacacggtgcaagaaggaagaaaaggcctttttcctgcctcagctttgcagcctccctccagtgccctttattggcaaagcaaagcaccaggctaagtgacagagaagaaatgtagcctgctgttgggtccaactccagtatcacaaagcagggcaaagggtgagttaggaagcgagagacagtaaatggataactggcacagtgagtaaaatttttgtgtaactttaaatattacaagttaactttattttgcatcatggggttgataactatcattcaattaacaggttttaacaaaattttcaaaaataaaaaatctgacagtaattggaagataacaaagcataagtgtgaataaaaaattgccgcctgtaatcccagcactttgggaggctgaggtggacagatcatttgagatcaggagtttgagactagcgtggccaatatggtgaaatctcgtctctactaaaaatacaaaaattagctgggcttggtggtgcacacctgtaatcccagctgcttgggaggctggggcaggagaatcgcttgaaaccaggagatgtaggttgcagtgagaggaaatcgccactgtactccagcctgagcaacaaagcargactccatctcamaaaaaaaaaaaaaaaaaaaagattgctctcccaccctcttagccacattgaattttcttactttccttatttatttatttttttattgaaaaaaaaatattagagatggggtatcattatgttgcccaggctggtctcaaactcatgggctcaagggatccacccacctcatccaccaaaagtgctgagattacaggtgtgagccactgcgcccagccgaattttcttaatttcatgtatgactaattttctcttctaatcatttcatttttcttgaattgttatattctctcccaacttttctytttttaacgacattgagctctcctcttcctgtcttccattagcacctttcctaacaaccttatttgttcttcaattgttatttatgcttgtcttctcagctaaattgtaaggcccttgtagtgaactcagggactgtgctttatattacttctgtatattacagaataggactatacgaatgcakgttgaatagatggaatcattttatatttacaattaagtaagaaaatggaaacatagccatcaaagcagtcaaggaacaggtaggcacttaccctttctattctcccttgctaccttcttttttgttcttgttttgagacggggtctggctctgtctgcaggcttggagtacagtggtacaatctcagctcactgcagcctcaacctcctgggctcaagccatcctttcacctcagcctccaggtagctgggactacaggtgcacaccaccatgcccagctaatttttgtatttttgtagagacggggtttcaccatattgcccgggctggtctcaaacttcttacctcaagcaatccatccacctctctgcctcccaaagtgtttgggttacaagcgtgagccactgcacccagcctccgttgctactttttcagaagctattaatagtctgccagttgtctctcgctctctagaaagaatatagctaacattagaaatgtaaaaacaaaaccaaggtaggagtgggggggatgacaaaacagttataatcatggaaaaagctaaagacatctgaagtgaaaaataaatgtggagggcactttaaggttaatgatggttttaatgtacactctggcttttctttcgaaaccctactaaaacaatttttttaaaaaatataagagccctcaaggagagaacaagagagatgacaacagcagcaagattttggaaggtggaaagtatgtgaatttagcaagcctatgaaaaataatacaaagtgaggaaagccaagaaccaaggcagttcacgaaacttcaaaggctgaagattggtggtacaggtgaaggaggagatggcttaaataaggaggattaaagtgtatttaggagtcacatacctatatcacctgctttattctctcccacaaaagactggagctttattctctaaagttaaaacacaatggttactcaaccggtggatactagaccagtggaagatggggtctgtactgaaatttttttttttttttgagacagagactcgtgctgtcgaccaggctggagtgcagtggcgcaatctcggctcactgcaagctccgcctcccgggttcacgccattctcctgcctcagcctccggagtagctgggactacaggtgcccgccaccaygcccggctaattttttgtatttttagtagagatggggtttcaccgtattagctaggatggtctccatcttctgacctcgtgatccgcctgcctcggcctcccaaagtgctgggaytacaggcgtgagccactgcgcccagccgtttttgttttttttttccttttgagacagggtctcactctgtcacctaggctggagtggagtgacacgatctcggctcactgcaacctctgtctcctgggttcaagggattctcccatctcagcctcctgagtagctgggagtacaggcaggcgccaccatgcccagctaatttttatattttttggtagagacagggtttcaccatgttgtccaggctggtctcgaactcctgacttcaagtgatccgcctgcttcgggctcccaaagtgctgggattacaggtgtgagccaccatgcccggcctgcactgaaaatgtagcaaattatgcacgcattatatgctgaggccatctctccctccacacccaggccttcactctcsggtcaggaaattagaagagactaatctggggaatcygatcagcccaagaagaataaaggcactgacactggaagttctacaactaaacagcctgatcacactgtagcaaagcttacagtcarcaagcctagctcctacttgagttttcaagcagctttttagtctcctattcttacataggaaaagaaattaccaatgtttgagaaaagcccctaaaatgaaaaataaggactgaaggcaatgaatggaaggcaacttggagaaaacagaatatgccttcaagaaggtaaaattgataaatcgcatgatttaccacgtttcaatatcttaagtttagacagcagacagacatagtcgattctgtggttgatttagagataagtacagagmaaaccaagcaaactgaaaaactcagggaaaacaaaaaaaaatgtgcaagtaaggaaaagtaatcatagttaataatatgccttagctataaatagtatttgtataatcataataatgtagaaactgaatgttaatttaagttaccatgtataaccctgagaagataggagataggatgcatgtcatgtgtattatgaggaattaaggtgggaagggggaaaaaaagagtcaagttatcacttcctgtattgggggaagtcaatagaaaatgcctcaaattgaaaaatcaggaggtagcaatacaggcactttttttttcattcctttggttcattcctaggaatacaggcatattatttagtcatttaagacataaaggtaatataaaakaatcagctaaacagagtgaaagtgattgccatgggaaggagttaatggagaattacaggttttcttttctttttttttttttttgagacagagtctcagtcacccagactgaagtacacagtggcacaatcttggctccctgcarcctccatctccagggttcaagcgattctcctgcctcagcttcccaagtagctgggattacaggcacatgccaccacgcctgactaatttttgtatttttgatagagatggggtttcaccatgttggccagggtgctatcgaactcctggcctcaagtgatccgcccacctccgcctcccaaagtgttgggattacaggtgtgagccactgtgctgggcctattttcttattaaacattgtttagccttgtttccaaaaatgttgcaatatccagtctctgtccctccgattacctatttcaccaattttttttttttttgagacagagtttcgttcttcttgcccaggctagggtgcaatggcatgatctcagctcaccgcaacttccacctcccggcttcaagcaattctcctgcctcagcttcctgagtagctgggattacaggcatgcgccaccattcccggctaattttgtatttttactggagacggggtttctccatgttgatcaggctggtctcgaactcctgacctcaggtgatctgcccacctcagcctcccaaagtgctgggattacaggcgtgagccactgcgcccagctatttcatctatttttaacaattaagttattttttattttttttaagacagagttttgctctcgttgcccaggttggagtgcaatggcgcgatctcagctcaccgcaacctccgcctcctgacttcaagcgattctcctgtctcagcctctagagtagctgggattatagacatgcgccaccacgctggctaattttgcatttttagtagagatggggtttctccgtgttggtcaggctggtcgcgaactcctgacctcaggtgatccgcccacttgcctcccaaagtgctgggattacaggcatgagccaccgcgcccggccaagatctttaaattaaaacgttattgctcacatattttcagttttgtgtcatgaaatctgtgtgcccaaamaatccaaaatatataattcattttctgggtgggaagcaactatatttctgtctcatgatgggaaatagaacccaaaattcaaggctttagcaatatgttgatcacacagtttgattaaggaatttcactttttcccatctttttcccttggtgtaaggggtattttcctgaatatctagctggattgcaattcacttgggaaaaaataaaattctatgccaattttcattattaaggtcctctaaatattgacctctggtaattggtaggttttggtggatggaattttacttttttgacatgacattgaattgtacatttagcactgggtctgggtgttctctctggggagagtggaattgatggttcttttttctgtcagtcccaggtggcctgtcaggagagcaggtgttgctgggatggtgcatgcattcaagagtcatagtgcaaatctcatcaaggcatgtatccccaaaccactcaggctggtatctctcctggggaagaggccaacactggcctctgctgctttttttttttttttttttttagaaaaagaaagaaaaactaattatcaacstgcagcaaatgtcattcaactcaaatccatgaaggataaaagcataggagacaaatgttcctggagacagggttgagctgtcacttgtctttttaatggattgttgtttggctatagaatcacatgttattttatctaatggtgtatttcatctgaagaaatactgaatagaattgtaccattttcataacccctctgggtttgaacagaatcctagcatcaaggaagatataagaggttattttcattgctcttaaaacattcaggggacgggtgtttattgacttagtcaatagttggctaatgttggccaggctggtctcaaactcctgacctcaagtgatccacccgcctcagcctcccamagtgttgggattacaggtgtgagccaccatgcctggcctatgtccagaaattcttaacatgtaacccaattcactcaggttttagattaagtatgtttccttttactctaaatgctatttgacaagtgaagtattgtccctaatactgcacctattttttcttttttcagtttttatattttttatagagatgggggagggtctcactatgttgcctaggctggaattgaactcttgaactcaagcagtcctcctgcctcagcctcctgagtaactaggaccacaggtgtaagccagtgagcctggcttcctttcttttacttacagttattatattccatttatctaccttgactacaccatgggcagttgggcagtgatctttgttacatttcagagggcagaattaggaacaatgagaagttagagagaagttggattttgttttggggtttgtttatttgttttgccacactcttggaagaactttccaaatgtccaagaattaaatggaccctcaaaaagtactgagtttcctatcagtggtaatgctcaggcagagctctgcaattaactatagaatgttatgagatactgcaggttattaggtgggagtttagatcagatattcttttcaactacatgaattaaggattctattatttttgctttcaacagaagatatacaaaataaacagccagtgtccatcttgaattgcaccattgtttataatatttctgtttttttaatcttacagtcctctctgttataacagttattacttattaatggagatagcaatgctattagtacttgtattgaattagtaagtgttctgatagaaaaattaaccagctttgccgggcgcggtggctcacgcctgtagtcccagcactttgggaggctgaggcaggtggatcacgaggtcaggagatcgagaccatcctggctaacatggtgaaaccccatctctactaaaaatacaaaaaattagccaggcgtggtggtgggtgcctgtagtcccagctactcgggaggctgaggcaggagaatggtgtgaacccaggaggcggagcttgcagtgagcagagattgtgccactgcactccagcctgggtgacagagtgagactccgtctcagaaaaaaaaaagaaaaattaaccagcttttcaaacagcatttagagtaaaaggaaacatacttaatctaatacctgagtgaactgggttacatgttaagaatttctggacataggccaggtgtggtggctcacacctgtaatcccaaaactttgggaggctgaggcagtcggatcacttgaggtcaggagtttgagacacctggccatcatggcaaaaccccatctctactaaaaatacaaaaattagcggggcatggtggcgcgtgcccagctacttgggaggctgaggcaggagaatcgcctgaacctgggaggtggagtttccagtgtgccgagatcacgccagtgtactccagcctgggcaacagagtgtgactcttgtctcaaaataaaaaagaatttccggagagaaaggaatgttaaaatttggaaactcttttttgggccttgaaaatgaagcacattttcatatctgggctgtctcactgacttgagccttaccttagtgactgtttctaaaatgtcttcttttcacacatccccagtccacatttctttttctactgtttcaagagaagttcccttttaccagtaatatctagactatcttgagtaaaccttcttctttaatatcaaaatccttttgtctcttttctcctccctttttcccaattccaagaagtatcctttctcttaagagttaccttccttttctgtgtattctggttgctgttttctggtgacttgtaaggaaccttcagccttatttccatgttttttcccctctctccagcatcataagtctattcctcttccaacatcattttctctccaacatttccagtggaagggatctcatttccattgccagacaattagaatcatcccagtagaattctcccatctctctacttctcttaatttatagccacagttgttatttatgatgttagttgcaatacagaaagaaagcaaatttctctcacacataaatagttcaatgtatttgaagagatctatcatagtacccccttttaaaacttgttcatgttgccaatcatgtgtttctgttttttcaaaattagagcttatattatgcctcagacactattagattctaggatctcaaagataaaacatctgtgagatacttatccagtgagggacagtcatgtaatcagataactgtatttcattgtaaaagaagtttgtgtgaagttcatggctgacatgatggaaggaataagcagctctgcctgagtgggggtttcaggaaaagcttcacagaagagacactggaagctgggtcttgargagcacataaaaatctgccagatggacatcagcagtactggaatacgaaagaggggaggagtgatgggcctgtttaagtaattagaataacrtggacaggaacagaagtgtgaagtcacatggtgcatttgaagacctgctagttgttcctgtgtagcaggagcatatggaagaaaagcaagagacraagttgttcattagatgtgagctccatgagagccaggacctcacctggcccattcgttattgtatccacattgcctagtgcataacagatgcttagtaaatatccagtgaataaataaataaagaggtaggtaagggccagatctagaagtgatttttgtctaaattccacaaagactgactttttttgctcttttaggacttgtatatcttctataggttcttaagcataattattaatgggcatttgtgtgtttttggggtaaatatgaactattaaattatttgattacctgccagaactcatagtgccacattttgccaaattaccaacctcaaaaaaaaaatggaaataatttttattgaggtgaactctataataccctgtttaactttatagaagttgccttggagtttaaatgttccattttctccctgattaaaaaaggaagagatagaaaagttagaggtttttatttttttagtttgatgtttcatattagactacagtgtgatatattatagtttctataagcagtagaaactataaagatagatataaactgtccaaaattaagtactgagagaaaaatattaaaagcaaaattaatagaaccttgatattgtgggacaatatcaagcagtttaacatacctgtaactagagttccagaaggaaaggagttaggtacaggccagaaaaaaaaaaaaattttaagacataaatgatcccaggcatggtggttcacacctgtaatcccacacttagagatactgtggctggtatattgcttgagcccaggagtttgagacaagcctgggcaacatagtgagactccgtctgtaccaaaaaaaaaaaaaaaaattagcttggtgtactctatatctttaacatgtttctgaaaaattctgccattaaatgaaaggtactggccaggcatagtggctcatgcctataatcctaacactttgagaggctgaggtgggtggatcacttgagcccaggagaccagcctggacaacatagcaagattccatctgtaaaaaaaaatttgccaggtgtggtagcatgcacctatagacccagctacttgggagactgaggcaggaggattgctttgaaggtcaaggctgcagtgagctacaattgtaacactacactccagcctaggtgacagagtgagagcctgtctaaaaaaaaaaaaaaacccaaacaaaagtctgttgtattttttacaccagaaacaattagaaaataatgtttcagaaagatgattttcccagtcgtagtaagaatataaagtacattaagttttaatctacaaaaaattttagtggaaaaaaattgtaaattttattgacaggcattaaagaaaacctaaataaatgttatgaactagaaggaaaacaaaagccattatactagaaatttagtaaaagaatgttgtctaaaaagtaatgaacggttatataagcaaagtcagaacttacatagacctagaaataggaaaatgaatttagatcaaatattattttatgtctgtcttcattttaatattttaattcttttttttttttttttttttgagacagagtcttgctctgtcacccagtctggagagcaatggtgcgatcttggctcactgcaacctccacctcccaggttcaagcagttctcctgccacagcctcccaagtagctgggattacaggcatgcgccaccaaacctggctaattttttgtatttttagtggatatgggattttgccatattggccaggctgatctctaactgacctcagatgatctgcccacctcggcctcccaaagtgctgggattacaggcatgagccactgctctcggcccattttaattcttaaagcaaacttaagtcatatttcttgggaaatttgtgtctgtaatgtttgaaacattgaatgctgtttcttcactattgtaaggctttgaccatttccctagcttttctgtgctcctacattcttctgttacagcactgtcatattatattataatggtatatgtatctctagtctgtgaactccttttacatcaggaaccatggggagataactgtagcaaagccgttaaaacacaggacctggagataaggccacccggatccagtgctgcctctgccatttactggcggtgtaatcttgacaagttatataacttctctctctcagttccttcatttataaaatgagaataataaattatatctacttataggggggttgtgagaattttaagtaataatacatgttaagtgaacataatcattaagaaatgttaataattatggttcttagctgttccatagcacaaactcttcactgcgtgtgctctaagtttgatcaatgtgtaataaacagattagcattacagtggtgtcaggtgcaacttaggactgagcaggttatgtgatgtgatgtgtggagcaggtacaacttgttttcagtaagaggtaagaagtataacatcaagacagcaccaaagaaagatggcctttactggagccagtgagcactttgcctcattaataaaatacgaatgtagttagatcagaaaatgttctgctcaaatagccacacaggactgaatggcaaccatgtaactagtgtggtgattatggaggttcctatgggccctttgagaaattatgccatcagaataagtgtgctaacttgtttagtgagtttctgaatattctaatctcttcaaattgtgaatgcaaaaaagttgagaactcctaatcctgtataaaattgtatccaataaatacgtattgaatgaaccaattaaaaaaagaaactatcaatattatttttcagtatctttcaagtgtagcacaatactgacatagaacctataattaaatgctttttgtataaaaagcattctgttgttcatgatctgaatttggattgctgatttggttattacttagccaattatttacatgtactaaggattacttagtgtttttttgtgtgttttgttttgttttttgagacagagtttcgctcttgttgcccaggctggagtgcaatggcatgatctcagctcgcckcaacctctgcctcctgggttcaagtgattctcctgcctcagccccctgaatagctgggattacaggcttgcaccaccacgcctggctaattttgtatttttagtagagacagggtttctccatgttggtcaggctcgtcttgaactcccaacctcaggtgatccgcccgccttggcctcccaaagtcctgggagtacaggcatgagccatcgtgcccagcctggattacttagtttttacagcaacattaatctttcactttgtggattttgatatgtttaaatatacagtttgttaaatgtttttgtatttaatgcatttgcattcatctaatctacttattttaaatctaattgtatcctgacttcctagcatgagtggttaaacaaaaggaatatttttcaaataattattcatagtatgtaaataacctaagtactgtacttttaagtcaaaatatagtatctttgttattaaaaacagtacagcataatacaaattctgatgttatttgaatttaaacagaattgaatttatgaagtaytttttctttaattatatggcagtaatgtcccaatgctcaaattttttatccagaccattgattaattagattttctgccmgttctcttgcgagaacaaagccagaaggacagggcaagcttcctttgtgcttcaggatagaggtaagaggtgcctttgtctttagtgaagaaacccaggttctgttgccatagatctcctctttgtgaatgaagtctttctatcaggggtttgacttgaacctgaaggtctttttatatctctgcatttaatttttgctcagctctagacatctcccacttttaaaaggagctttattgagatattttccacatacaataaaattcacccacttgaagtgtacaagtcaatgggtttttaatacagtcatatgttgcttaactctggggatatgttctcagaaattcaacattaggtgatttcattgtgtgaacatcatrgtgtgttcttacacaaacctagatagtatagcctactacacacctaggctatatggtatagcctattactcataggccacaaacctgtacagtatgttactgtactgaatactagaggcagttggaacacaacagtaagtattggtgcatctaaacatagaaaaggtagagtaaagatacagtatagctgggcatggtgatgggcacctgtagtcccagctactcaggaggctattgggggggaggattggttgagcccaggagttctagcctgtagtgcgctatgccaatcaggtatctgcactaagttcagcatcaatatggtgaccttatgggagcaggggctaccagtttgcctaaggaagggtgaaccagcccacgttggaaactgaaggtcagaactcgtgttcttatcactagcgggatcatgcctgtgaatagctgctgcactccagcttgggcaacaaagtgagaccccttctcttaaaaaaacaaaaactaaaacagtataatacatttgaaaaaaaaaaatggtacacctagcctgggcaacatgtcaaggtcccatctctgcaaacaaattaaaaaattagccaggtatggtggtgcatgcttgtggtcctagctactcaggaggctgaggcaggaggatcacttaagccctcagttaacggaggtcgaggctgcagtgagccatgatcacaccactgcactctatcctgggtgacagagtgaaaccttgactcaaagaaaataataataataataataataataataataataataataatgtacacctgtatagggtacttaccatgagtggaacttataggactggaagttgttctgggttagtcagtgagtgagtggtgagtgaatatgaaagcctaggacattacactactgcaaactttataaacactgtacacttaggctatactaaatgtattaaaatatgtttctttgataataaattaaccttagcttactgtagcttttttactttataaacttctaattttttttttaactttttaactcttttgtaatagcacttaacttaaaacacaaggctggggcatggtggctcatgtttataatctcagcactttgggaggccaaggtgggaggatcagtgagctgaggagttcagggttgcagtgagccatgatcaggccaccatactcctgtccaggctatgtagcgaggccccaggatcacttgaagccaggagttcaagaccagcctgggcaatatagcaagaccctgtctctacaaaaaaaaaaaatagaaattagctgagcatggtactgtgtgcctgagatcccagctgttcaggaggctgaggtaggaggattgcttgagcccaggagtgtgaggccgcagtaagctataatcacaccactgcactccagcctgggtggcaaagcaagatcccatctcttaacacagacacatacacacacacacacacacacacacacacacacacacacacccccattatacagctataccaaaatcttctccttctttatatcctttttctataagatttttctatctttaaaattgtttaggccaggtgcagtggctcatgcctgtaatcccaacactttgggaggctgaggcagtaggatcacttgagttgaggagtacaggattacagtgagccatgatcaggccactgcactcctgcctgggtgacatagtgaggcccagtctctaagacacaaacacacacattaacctaggactacacatggttaggatcatgggcattactctcttctatctccacatcttgtcccactggaaggtcttcagaggcagtaacacacatggagctgtcatctcctgtgataacagtgccttctagaatacctcctgtaggagctgcctgaggctgttttatattataattattgagattgagccatgctctgtcacccaggctagagtgcagtggcgcaatctcggctcactgaaacttccacctcctgggttcaagcaatttccggctagtttttctatttttagtagagacggggtttcaccatgttggccaggctggttttgaactcctgacctcaagtgatccgcctgccttggcctcccaaagtgctaggattacagacatgagccactgcacccagctatagttaacttttttttttaataagtagaagtactttctaaaataatgacaaaaagtataataaatacataaaccagtaatattgccatctatcattatcaagtatgtactatacataattgtgtgtgctgaacttttatatgactgtcagcacagtaggtttgttgacaccagcattaccacaaacacatgagtaatgcgttgcactatgacgatgttacaacagctacaacatccctaggagataggaatttttaagttccattataatcttatgggaccaccatcatgtatgtggttcattgttggctgaaattttatgcagcacatgactatatttacagaatacttcagctatcagcacagttaatgttttaatatttctatcaccccaaaagaaactccatatccatttgagtcattccttattcctcctcactctcccaacctgccctgctagaccaaagtaaccactaacctattttctatctctgggttttatttcattttattgccaaataatattccattacatggataaactatgttttgtttattcattcatcagtgggacatttgggttgtttccactttttttttttttgagactgagtttccctcttgttgcccaggccggagtgcaatggtgcgatctcggctcactgcaacctccacctcctgggttcaagccattctcctgcatcagcctcccaagtagctgggattacaggcatgtgtcaccacacccggctaattttgtatctttagtagggatggggtttctccatgttggtcaggctggtctcgaactcctgacctcaggtgatctgcctgcctcggcctcccaaggtgctgggattacaggtgtgacctactgcgcccggcctgtttgcactttttgactattataaataatgctgctgtgaacattcatgtacaagttttgtgtcatcgttttcagcttttgatgtaaggggatgtttgtatattatgccataagatatgcatcagaacaccctagataaagttttaacttaatgtgagaataacatatcatgcaatggtccaaatacattttactaaactgataggtcactcaaccattcattagtctctcctatgtctttttgagttatttagaaactgtgacttagtaagcaaaaacacagccctttttgttttcatcagtctgaatattggatttcatttcaagggactctaaagtttgatattttatatcttgagctaggatggaaaagaatgatgtattgtgaattcatttacagttggttggctatcttggggcatgaaaagctgaatgacagcaattggtcatacctctgttatgttgtttttattttgtttgttggtttatttatttattgagatggagtctcgctctgtcgcccaggctggagtgcaatggcgtgatctctgctcattccaacctccgccacgtgcgctcaagcaattctcctgcctcagcctcctgagtagctgggattacaggcacccgccaccaggcctggctaattttttgtatttttggtagagacggggtttcatcatgttggccaggctggtctcaaactcctgacctcaagtgattcacctgcctcggcctcccaaagcacggggattaacaggtgtgagccactgcacccggcctgttgttgtttttaaatctcagtcatagatttttgtttcgtttttgcttagagtgtaactttgcgagaaagaatctatacacttaaaatgctgaatagatttctggcatacagaaattaatttttatattcacattaacctcaaagacacatcattgattgtacagatgaagtgaatgtacccagcagctgaagctgaacttgagcaataatggttcaaagaatgtgattaatggtaggaatctttaggtgtattattcatattgtcttttggccattgactcaattctggattttgggatttattagaaataggatcccttaatcaaatcaaagctagattagtggggacttaattaataagtactctttattaaaataatttttttttttttttgcgacagattcttgctctgtcgcccaggctggagtgcagtggtgcgattttggctcactgcaaactatgcctcctgggttcaagtgattctcgtgcgttagcctcccgagtagctgggattacaggtgtatgccaccacacctagctaatttttgtattttttagtagagacggggtttcgccatattggccaggctggtctcaaattcctggcctcaagtgatccacccacctcaacctcccaaagtgctgggattacaggtgtgagccaccacacccaggctagcttttgtagttcttctaccttcaaaaaaaatagagaggctggacatagtgcctcatgcctataatcctaacactttgggaggccatggtgggaggatcacttgaggccaggagttcaggaccagcctggccaacatagtgagaccccatctctacaaaaaaaaacaacttaaaaattagctgagcatgatggcatgcacctgtaggcccggctactcaggaggctgaggtgagaggaccacttgagcccaggattttgaggagctatgatcacgccactacactccagcctgggcaacagaatgagaccctgtctcaaaaaataataataatacagtaatatatttataaaggctcattcaagcacatccctctctttctaaagcttttcctgtccatccaaaccaagtcttctgcagaattaattatctccattctatcctcataaatgtgttctatactcatataggattcattacattgtttgataataatttattgcccaggctgtcttcttccaagattctcaaggttaaggactgtattgtagccttaacactgagtacaatagatagcaatagagggctatagttttggtaaaaattctaattckttgggccgggcatggtgactcatgcctgtaatcccaacactttggaaggcctaggcaggcggatcatttgaggtcaggagttcgagaccagcctcgccaacatggtgaaaccccatctctactaaaaatacaaaattagctgtgcatggtggcacatgcctgtagtcccagctactcgggaggctgcggcagaatcgcttgaacccgggaggtggaggttgcagtgaaccaagatcaggccactgcactccagcctgggtgacagagtgagactccatctcaaaaaaaaaaaaagaaaaaaaaaaaatctaattcttcggctaaatgttctcatttttccttctgtaggccatattttctaaaagacaccccccttgtggtttaattgtgagaagtatgctttatgattataattttgataaaataaaagcctgcctcctctgttagtaatgaattagagctgcagggaactggaaacaaaatgaaagagcctggataatataggctaatggttytcagactttagcatgagttagaatcacctgtagggctggctaaaccatggatcctgtgctcaagctcttgagtttctgattcagtagatttggtatggagcctaacaagttctgaagtgatgcttatgtagttggtcaagtaccacactctgagaaccactaacattataaattctaactaacctacctgaaagacatccagtttactgaaataggttctgttcctgatatccgcacctggccctctcttgaagatcttgtgggggaaagtactccatatttgcaaagctctctrcctgcatagtgtctacaccgaggacaaactcttggtgagcaaacttaagcgctcaaaggagggaggaggaatttttttttttttttttttttgagacggagcctcaatctgtcacccaggctggagtgcagtggcatgatctcggctcactgcaagctccgcctcccgggttcacgccattctcctgcctcagcctcccaagtagctgggactacaggcgcctgccaccacgcccagctaatttttttttttgtatttttagtagagayggggtttcaccgtggtctcgatctcctgacctcgtgatccgctcgcctcggcctcccaaagtactgggattacaggcgtgagccaccgcgcccagcctagggaggaggaattttttaaggaagaatggtagatctcttttggtgtctcattatttgcaattgtaagagcacataatgggcacacagtaaaatgtctactaactgattaaactagtttagaactctaaccttctgattttgaggccagtggtctarcatataaaaatgctgcttttcactttcactttggcattggtatgaatgcaattaaaattaatgaagtgaaaaaaatacattttaaatttaattattaagaatcataggcctggctgggcacagtggcttatgcctgtaatatcggtactttgggaggctgaggcgggagaatcacttgagccaaggagttcaagaccagcctgagcaacgtagtgagaccctgtctacaaaaaatagaaaaattacctgagcatggtggtacgcacttgtaatcccagctactggagagactgagaggtgggaggatcacttgagccaggaggtagaagctacagtgagcygtgatcatgccactgcactctagcctgggtgatggagcaagactctgtctcaaaaaaaaaaaaaaaaaaaaggaaaaaagaaaagaaaaggaaagaatggaaggccatttgcagtggctcacacctgtaatcccagcattttggaaggacagagtgagaggatcacttattaaggtcaggagttcaagaccagctctggcaaygtagcgagacctcatctacaaaaaaatttttaagaagaaaaaaagccggtccaggcatggtggccagctactcagggggctaaggtgggaggactgtttgagcctaggaggttgaggctgcagcgagccatgatcacaccagtgccctccagcctgggtgatagcaagaccctgtcaaaaaaaaaaaaaaaattctagtacatgcttatgcttatactagaatctaattaaccagattttcccccgtctattgtgttttgccacattatgtataatttattttaagatcctaaattatggtctgtattatcattgaaatagtattctttcatttaatacacatttactatatgttaaccataagcaggttaagctgtagagtttcagtgatacagactattatactcaatataattttctggctgaggatccttttgtgttctaattattttaaactagtagttcatgaattttttaaataagattattcagaaacatcaatatcaaatattctgaaaaaacagaaagtttactagcggttatttctaatcacagggaaaataaccactaccatatgacttcctaagtagacacatcaagttcttacctgattgtgatgtggttttgaaacaaattcataagcaaatgaagacagaaattgttgtacctttgtactgctacatgattttagaggaaaaagttttttaaaattaaggctgactagatggctactgtatattgtgctttttatttatttgtttatttttttgagacaaggtctcactctgtcacccaggttagagtgctgtggcgcaatctcggctcactgcaacttctgmctcccaggctcaagcagtcctcccaccccagccttctgagttgctgggaccacaggtgcccaccatgcccagctaattctttgtattttttgtggagagggggttttgctgtgttgcccaggctgttctgaaactcctgagctctagcggtctgcccgcctaggcctcccaaagtgctgggattacaggtgtgagctactgcgcctgaccttttgtgcattttttccaagtccattagggaaattatctttaaaagtattttcacattgatgaatttattgttcagtcaggttgagaaaatgagccatatttattgaaaccacagtgcaaacaattaaaaatcaaattatcaattaaattatcagctaagtaatgtagatgctgatttgtccaaatcagccaagtaatgtagatgctgatttggacaaatcagcatctgtgaagtaaaagaatgatcgcagtaaaattggattagtgaggtcatcatttacatatacagttgttgatagtgtgagggcaaagtattaatagtagaaatttagttagactagtggaatkttaacttaagctattcctttttgtgacttgttagctatcaaactggcctggacctgaaagttagtcttgctacctatctcaaaagcttcttttgagaagattcagtaagtaaccaaggactctttctctccacttgccagcaaattttgtagaagcaacatgttaagccgggcagtttccctcatagttgttttatgggcaaagtgaaaattgtattcttagattcatcagtatgatttcttaaatatttaagagagagaaagcttggaaggtagtagctccttattattaggcttaacctgagtttgatttggtagattttaaaaaatatgtaatctgtgtttgattcttggttgtatgtaatttgttcctcatctaaagaatttaacgatggaaataaacattcgtgacatgaaaagttacccttctctctctctctctcttttttttttttttagacggagtctcactctgtcgcccaggctggagtgcagtggcgcgatctcagctcactgcaagtttcatctcccgggttcacgctattctcctgcctcagcctcccaagtagctggcactacaggtgcccgccaccacgcccggctaattttttttgtatttttagtagagacggggattcaccatgttagccaggatggtctcgatctcctgacctcgtgatctgcctgcctcggcctcccaaagtgctgggattacaggcatgagccaccgcactcagccaaaaagttacccgcttctaaagctttttctgtccatctatttccaggccaattaatcatccctgtctctgctccctggcctactcttccctgagtactcattcatgttgcttctaacttatgaatgatattatgatatgtagtgataatgaggaaaaagctatatttccagggaagcatttggtgaggttttctttttattatagaaaatttttaagctaactaaagtacagagaatgttacaatraaccctgtgtacycatccccagcttcaaaaatgatcaactttctgctattcttgttttatctgtaccccctttatcacactttttgttatgttgtttactataatattttaaggcaaatcctagatgtcataccatttcattcataaataygttcatacatatctctaaccagaagatccccccttttttgaaacactaccattattaacatatcaaacagaataaaataataattatttaataacatctaatagtccatgtccagttcggctcaaaattgtttttttacaataggtttgtttgaatcaggatccaaacaaggtctgtacattgcatttagttgacatgaatcttaagtctcttttaatttctctgtaactgcaccccctagttcctctggattttttccccattaattaatgaagaagatgggttgtttgtctgataggattccccacattttctcactctgtcacccaggctggagtgcacaggtgtgatcttcactcacagtagccttgacatcctgggctcaagtgatcctcccacctcagcctcccaagtagctgggaccacaggcacatgccaccacgcctggctaatttttgtattttttgtggagatgggatttctccatgttgcctgggctgcgctcaagcgatccacccaccttggcttcccaagttggtgggattacaggcgtgagccaccacacccggcccccacattttaagtttggataattttatcctagtgatgtcatttracatgttcttctttcccgccaaatttcctgtaagctgatagagctagataatggattgggtttggattcagtctttttggcaagaatgcttcataatggtactgtgtgctccctgttccttcacatcaagactgacatgacatctgtctgttccagtttgagtgaagatcagtggctttgggtggtatcagtcatattattttcaaaataataacagtaatgataataacatttattattctattaaatcggcaactgtttggcttccctgaaatacagttcaaagaagaatggcagaaaaaatgttaaatttttcctcttttcatytgtcaattttcagaatgagttgaagtgactgaggacttttttaaaatatcatagatgtttgtatttgttgtatttagatctattacaatcattattctttttttcttcaaaatggtcccatctttagtgggtgccccttcaagttggctcctgtcttttgacatgaccctagtacatcttttttcttttttatttattttttcttctttttaaaaattttttcttattttttgttagactgaaacatggaagaccctagtaaccttgataaccttcttgctttcaggcatgtcaggatatccctggttcacttacttctccagatttggaatcttatccatttctccaaggaaccctggtttcttttagtagaaatctaggcactaatagtactcattgttaagagactgtcattgtctctaggcctgttctatgaacagggtaggtaaatatggttttagtgaaaagacaaaaaggaattgtattcttaccaataatgcagccagttcaaatttaaaatatttggggattgggggtttttatgtaatatatttgattttataatgatttcttttttttttttttttttttttttgagatggagtcttgctctgtcacccaggctggagtgcagtggcttaatctcagctcactgcaagctccacttcctgggttcacgccattctcctgcctcagcctcccggttagctgggactacaggctccgccaccacatctggctaattttttgtatttttagtagagacggggtttcaccatgttagcccggatggtctcaatctcctgacctcgtgatctgcctgcctcggcctccgaaagtgctgggattacaggcatgagccaccgcgcccagccagtgatttcttttttaatgctgaaaatcttggttcctaataactaacataattattttatttaacctacaataaaagttacttcaaaataactaactacatataacaacaagacccctggatgcagcttaaggtttctttctatttcatttatttatttatttttgagacagggtctcactctattgctcargctggagtgtagtgacacratcatccctctccctattgatggatatttgagttgtttctcatcttcagttattacaaatagtactgaactgaataggcatgtgagtaactctaaagtggaatttctgggttaaagggtaaaatgcatatgtaattttacttaaacaaaaatatttgatgctcagtgtttaattaagaactgaggccgggcacagtggctcatgcttgtaatcacagcactttgggaagccgaggtggctggatcacttgagatcaggagttcgagaccatcctggccaacatgatgaaaccccatctctacgaaaaaacacaaaaaattagccaggcatggtggctcacacctgtaatcccagctacttgggaaggctgaggcgggagaatcgcttgaacccaggaggcggaggttgcagtgagccaagatggtgccactgcactccagcctgggtgacagagtgagactctgtctcaaaaaaacaaacaaacaaacaaacaaaaaactgaaaaggaaatagagttcctctttcctcatatatgaatatattatttcaacagattgttgatcacctaccatatgcttggtattgttctaattgctggggatacagcaagaggttctgcagaacttcatggagcatgaaagtaaataaacaaagttaatttcaaggccaggcatggttgctcacacctttaatcccagcactttgggaggctgaggcaggtggatcacttgagcccaggagttcaaggctgcagtgagccaagattgtgccactactctccaggctgggcaacagagcaagaccctgtctcagggggaacaaaaagttaatttcagattttgttaagtgctgtaaaggaagtaaataggttgatattcaagaaagcacctgaaggccaggcgtggtggctcacgcctgtaatctagcactttgggaggccgaggcaggcggatcacaaggtcaggagatttttggccaggcatggtggttcatgcctgtaatcccagtactttgggaggccaaggctgttgcatcactggaggccaggagttcaagaccagcctggccaacatggtgaaaccccatctctcctgaaaatacaaatattakccgggcgttatggcgcatgcctttagtctgagctactccgaagtctgagacacaagaatcacttgaatgggaggtagaggttgcagtgagccaagattgcaccactgtactccagcctgggtgacggggtgagactccatctcaaaaaagaaaaaaaagtaaaaaagaagaaagaatttcatacattatcttatttaatctcataagagtctgcaaagtctattttataattcccattttacagaaaaaaccaatgttcagaaaagtaaattacttgtttgtggtcttaaagtttggaaatgggggctggggtttgaatatgtctaattccaatgccagataagataaaaacctttttcagtgtattgcattgcctctcttaaccaaaaagaaagcaaaaaataatgagttagcagagtaaatggttttgattctcattttaacctgacagaaatacatatttttttttcttttaaagtactgctcttgtttatcactggattattacacattcaaaatatatatgcttgctttattttggggatatttgttgtataagaaaatagaggaatatgcctttttgtccaagctaaataaaacaacttcattatccatttttattgtttttttatttaatgatggttctacttttaaaataccacagcaaaaatatcttacaggtatttctagccttttcaaattatgtgccttctaagtgtcctatttatttatttcacaaatatttgttaacatctgtgtgcacgttactttacaagtgtcggttgaattaacttttgtaaatgtaatagcaaaaacattgtacagggttctgtaaatagccataaagttaatcttaggggaaaatttttttcttgtgccagcacttactgagcacttaactgtattatctttaaggctcacaataactcagtaaggtagataccaatccccacttaacagaggaaggaactgaggcatggagagcctacataattcatctgagatcactaatacgtgatggatttacacctaaggtagatttaaatcccttacgatcataggttttctgtcataagtattaaaagtttctattaaacaacaaaatagtttatagggaaatattatatttgtcctcactagtattttaaattaaatccataatgtccaatgaaccatacacaaaaattcatagagattttttgtatgtgctttaaactagaactagctgcagttaaaacccagattgtaattttacaaacaaggccacccctaacaatattaaaataaaatgatattattccctggcttaaagaaaaattctccaataaccatgggaatgcttgtggtatgaagacagcatcttaaatctcgatgcaagtcatacacaaagtgttattgcgatgaaaaaatagtggcgtgaataatacccgctcacagcccaagacatttgatgtatcttgggcctcagtgtttgttggattttayaatttcatgaggaagatttgtatttttttaaaaagttctatatttctgtgtgttccacttgatgtcaaatctgtattcttaggttgtagggttccattaaaaaaaataaataatctcagcccctcctccctccacccccgtttccccccacaytcattttgtataatatggtaatgatatcaccgtagcagtaattacgggtcatcttcatttctttcatctctgcctgttctggtggcttcattcctttgacgggaaagatttggctctgggtgctatgattattttgttaagcgttattcgaatagacaggagtgagagaaattaatcaatccaaatgcaattagcatcatgtttaacccagtgatggacgtctcaaggtgaaacagccaggggagtttcagacattattattcaatccagtggttcttatctaaattataatcaagagaggtttttattggcttctcagtgtgaagatgtaaccctttcccttccctgggggtcaagaagactaggccttcatcatccctagaygttagctgttgccagctgccagccccttgaagtcagatagacagggcaggaaagttgtctgaatatgcaggtcatttgaaattatctatactgtgatcctggtctgattttcctgagagtggaacctagcctatgaataagctactctgtctaacttggggcaaaatattttgtgttctgatcaagtcactttgactagttgttgttcttctatcttaaccttacatgatagattattattgctgttcttactttatggatgaggatattaagtctgtgaagctactagcctttggtcataataagtgtttcaccaggatgtattactatgtaaaggccctgaagcatgaatgttctgcacaaatttatgagtatttaataaaagttctagcccccagagtattaattcattgctctgatctcattgcctttcattcaattgagttgtacccttgaaaaggaaaccaagtaaaactatgaaatagacctgtcaggtcctcagaaaaggaaacaaagtgcagctaagaagttgttagctctcatttctcgaacacagatctttgggggttttttgctgttgttttggtttgtttctagtaggaagaaggatgataagaatacatatttgaaatctagtcttgttttgctcttaaaagagggcagagcaaggagagttgatggagaaacagtctttcacttgaatgcaacatttttcaaatgcctgacaattaagattcttctacttctgccttcaatcatcaggcatcatggctgacacttcccatattttatgttcctgcttgatgttttatattctgaaaataaatctgttggttggatatttctgtccttttttttctgttatgaaaagccattaaaattattttccatattggaactgtccaaatttgtttacctgcacattgagtcctggcttttctttttcatattacttcttggataaaacactgtctgcaaatgggtgttactatgaattgaagaaaaaaagtttgatataaaattatctttctcaggctgggcatggtggctcatgcctgtaatcccagcactttgggagactgaggcaagaggattgcttgaggccaagagttcaagaccagttcaacatagcaagaccccatatctacaaaaaattaaagttataaagtaaaataaataataaaattttctttctcagcagtcactggagggaacattgttcttggccactgcacgcttttggaagaatcctgataaagagccaagatacccaatagaaagataatctagaaagtgtgctcccaaaaagatttttttgagaacactgaggacaaaaattttgatagtctgtgatagtttgatccagactgttcttttctcaggtatatagtattttagtctcctctttgaaatgttttattatgcctaaataactttttttttttttttttgagacagagtcttaccctgtcacccaggcttgagtacactggtgcgatctcagctcactgcaacctccgcctcccagattcaagcaatcctcccccttcagcctcccaagtagctgggattacaagcatgtgccaccatgcctagctaatttttgtatttttactagagatggggttccaccatgctgcccaggctggtctcaaactcctgacctcaagtgatctggctgtctcgacctcccaaagtgctgggattatagatctgagccaccatgcctggccacctaaagaactttaggcaaaagcctcaaggctgccgaccttcaaatgctacttttatatattttagagagaagtaagatttacaccaaagactgttgctagtgtatacttctccacaagagtggacggagaacaatcagtggaccttattacagttacaccacctgctgagggccaccaagtgtcctaatgggatgaagctccaaaagacccgtcctcatccagtgacactgtgtgctcttcacagctccttctgctcttgacagtgactccagcaccagctgctctcatatcagaggcattaaaaagtgcttagtccttgacttattgatcacttagtgatacttttcctgtggagatctgacactgagctggagtgtggtgaagagtcagtctggcagactgccctggaactgctctgctgtacaccagctctgcgccagagccacagggaaacgttgcacattcctgcgagacagaaatcagcattataaatcacattgctctctttttgttctctgccaatccaccagaatacctgttaacaacagctagctccatctcaaaggcagcattgcctttgagaatagtctctttctgtgggaaagcatgtctttgactttatttgaatcttyctaatatctagtacatagtgtgtgctccatgtgactgccttcactcttcaccaccccctccatgcttcttttctgcacagcacacactgataactgatcagcaggtcccttttgtcatagctgttagaatacattcaagatagaatacattcaagatttcagggaccaaaaaagtaattttaaaagaagagtcaaaactataactataacaaatggcatcatttctgtaaaaacatcttttatgaggccaattaaataaacagcctttagcacattgatttaaactaaactggggtttttttctttctttcttttttttttttttgagatggagccttgctctgtcgtccaggccggagtgcagtggtgcaatctcgactcactgcaagctccgcctcccgggttcacgccattctcctgcctcagcctccccagtagctgggactacaggcacccaccaccaygcctggctaattttttttgtatttttagtagagatggagtttcaccgtgttagccaggatggtcacgatctcctgacctcgtgatctgcccacctcggccttccaaagtgctgggattacaggcgtgagccaccgcgcccggccactaaactgggattttatgtgttccttttggctagaagtatctactggtatagttaaagaaggtagctccacctagtacccgacattactccagccaggcttaatacaccacagtatgccttcattcacacagatgcaagtcatttgtgttaccatttatcttgcattggaagatctttttagaaataaataggtcttttgtcactcctggtgctatgtatgtgcttacttggtgtagatctggtacctcctgtaaagcagcagctaaggagactccacggcttaccatgactgacaagaaggccaaggaaggaagcaagactgagaacagtggttgttttttgtttttgtttttgttttttgttttttgagacagagtctcactccgttgaccaggctggattacagtcgcatgatctcggctcactgcaacctctgcctcctgggttcaagcgattctcctgcctcagcctcccgagtagctgggactacaggcacatgcccccacgcccagctaatttttgtatttttagtagagatgaggtttcaccatgttggccaggctggtctcgaactcctgacccctcaggtagtccgcctgccttggcctcccaaagtgctgggattacaggcatgagccaccatgcccagccaacagtggtcatattaatttgaaggtggaggggtaggatagttcagtggtgcagtctaagattaagaggcatacaccacttggtagactaatgaaagctcgttgtgaacaacagtatatcaatgaggcagatcagattccaatttgatgggcagccaattaatgagacagacacacctgcacagttggaaatgaggatacaattgatatgttccagcagcagacaggaggtgtctactacaaagggaacctgctctttactgcagaactccattcccacagaccaggaatacattctcagaaaactacaactccgttgaattccatcctgactacaaaagtgtaggtttttttttgtcctttcgtgtacccctttctcattcctttactgtgcataaagggactggcatttgtgcacaagcatattacctttttatttttaaactaaatggccaatgatatgttttgatcaacatcagatggagataagatggggataamtactgattctgtggcaatgccccctttctccattagtggcatgctcattcagctcttatctttatacttcattaagttattttgcctcatcatttaataaaaatcaataacaaaaaatccttccatgcttgaagctagtagttcaagatcctgtctccacaaaaaaaaaaaaaaagaaaaaaattagccaggtattgcacgcctgtagtcacaactacttaggaggctgaggcaggaggatcacttgagtccaggaggttgaggctgcagtgagctatggctgcaccactgcactccagcctgggtgacagaacgagaccttgtctcttataaaaaaaaaaaaaatccttccataccttgttaaatttgagaattttggtgtttttcacgtgtcattctaaaaccaaccagtttttaaactcttgtacatagctgttacatgtagggcaatatgtctttaagtagggataagttactctaaaagaaatgaatcttagatagttttcccaccaagcatcctattgcttaagkaaactttctgtttgaaatgaaacaaatagttttacagtagctagcatttattgaatgcctgtgtgactttgtattaatcctaccttgaatgaatgaggaaaggagctcagaaaaataacttggtaatttgcctatgtggcccagggtcaatgtaagagctgaagtcctgctcttttcacaatattacrttgtctcctttgtttcctggccactcatattacaatctcctaaaagcaacctgttattgctcttctgaatatgagaaacccagtggaaagtaatttgtccccgcttcacaaacatttttaattatgttgaggcatagaaatatttaaagtagtttgcattggaattgaaaaactgaactatgagtttcttccacttcattaaaaagtttcttaaamtttacattgttccctacataaaagctgagcagaattttatcaggcaattgcctcaaagttataatctggacaatctttctgtaataaaacccatatgtcattggggaaaggtgcagagccctggcagagagggctggtcttgagagaggttctgcacccaatctcgttaaccagggtgcctctggtaatccctcatccctcaccagtgagaaatcaatctgtaccactgaatctttttcaaccagccaccagaaaaatttactgcagagaaggcagtttggggatagttatcgtggaaagtgagccagaagcaaggctaaatgtaggatggaggaattggagagtctaaagaagagattatattaaaccacacaccactttcagagcaggcacagtggagtcctcctttcagccctgacctctccaagtatacccaggtatttacagctgccatgaactggatagccctggaggaactacgaaagtggtgggggataacagaaacagtggaaacctgaaagttgattgtagtctatccatttgctgtctctcagtgtgtagtagccagtcccctctccacactctgcagcatttcacatgttaaccctatagtgacagtttcaattgtggctttctcaatttgtgatctatgtacgacataatagggcctgtaaatcatgacttgacataggggtcatgcttctctcctgcacggcatacaccagtagctgatgaccagtgggcccctcttggcatagttattagaatggaarcggtgttgccttcctgtgaaaccttgtaatcttagagaataaatccagaatcaaaaaaatagttgacaggctgggcgaggtggctcatgcctataatcctagcactttgggaggccaaggcgggcagatcaactgaggtcaggagtccgagaccagcctggccaacatggtgaaaacctgtctgtaccaaaaatacaaagaattagccaagtgtggtggtgcatgcttgtaatcccagctacttgagagactgtggcaggagaatcacttgaaccggggaggcagaggttgcagtgagctgagattgcaacattgcactccaacctgggcaacaagagcgagactctgtttcaaaaaaaaagaaaatagttgacagatttcactgactctatataacactctctctctcccaatcttgttgtgtctagaattgttttctatataatataatacattatggggaacaaagaaaaaggagaaaatggaggaactgggagtgccaagctgaagaacatgtagtcttactctggccattcatcctagaattataccaagctacaaccattgtgaagaagaagggacagaaccaggcagtggggaatagaaatggctttctcttctctgtaagcaggcagtagtcatctctaaagatttttccccaaagagatttgaaattcctgatgggagcttaaaaagctaagagtaaaatacatttatttataagaccctactagaagaggtgtgtgtgggtgtgtgtgtgtatgtgtgtgtgtgtgtgtgtgtgcgcgtgtagacgaggaatacagaatagtagcagaaggctgtctccctactcctaatgggattttgtagcagtatgtgcaagtttgtttcagaagtcaaaaatgaacagatgttagtataaattacctctgtgtctgatgtcttgcaaattaaaagcgcagttggcatcactaaacaatttcactaggtttgggggggtgcggttagcgggcggtgattactgtagcaggtcggtaagaatcttcgccctgcagcagagcaaggataaagaaatgaggaataaaataagggctatatgaattaatcagaaatgttaacatctctgatgacaagtgaacaggagggcacgtgctctggagcagcccctgacccacagcaatttctctgtgcacaaaaaggggttggtgcttagcatctgatttatagggcacagccctcttttagggagcggctgtgtcatacattcgtatatctcctgtatgggactggcgagtaggaaaactttctctcctcccatgtaggagatgatgtcttttgaattacttctacttttacagtggtttcctgcagctctgtgtacttggattaggttgaagggggaggaatgattgagtagaaaaagggttgttaaaaaggattggttaaattcaaggagagcttgccactgagagacttcagaatatctatttatttttccttttaaacccttttgaccccttaaattgtgtggatcttttaaaattctaagtcttaaaatattggtcattttcccatttggggaaaaacagtaaggagttggtgagtctgaaggtcagcaggcagaaatcattggttagagcaatgcagtgctccaggcccaggatttttggaacaaggctctattctctccagaagacttttgtattgaccgtgtctggtttccagagctcctgcttctagccatgttgcaggatcattagttacatgtttaaacttgagagtagacagataacccatctagtagaaataagtgagacccaatctgcccaaaagtataagtaaatttcttttccttcaagctgagggaaaagattccaaggaacggagttttgtttgctagcctccctttgtgcagtttgttcattcattcattcattcattcactcactcagaaaatactaagtgcgagagaacttacccccctctggaaagtgttgtgttaatgattagcactataccaagcatgttcattgctaatatccaagagaaaagtagggtattaacatgctctccgttacaaatgaagagactgaggctcagagatctgcccagcccaaggtgtcaccctgctgctaagtgctagagctgaaacttaaactgagttcaaatcctgtgttctctgcaagaagcccatgctacctcctatgggcaagacagtacttgattggattttctctagagtagttagtccttgaccccagtctctccatgaacttggcattatttgcattaagggaaatgattttcttgccaaataagcaaggcacatttaaaaagactcccatcatgtagagaatggagcactgagggccactaactagtcatatttgttaatggaaaggaaggaaactaacattttttgcatttctacttggttctagttctttggtgtattataatttatccagtcaacacttactcagcagacactaggtctgctgagtctgtagcaggtcggtaagaatcttcgcagtgcagcagagcaaggataaagaaatgaggaataaaataagggctatatgaattaatcagaaatgttaacatctctgatgacaagtgaacaggagagcacgtgctctggagtttggatctgattgtggatcttttgccaagggagagaagaccaaagctcttaacagtctctgccttcagtttttacattttagtggaggaagacaaccatataagctagtaattgcatgcaagtcttatgggaactttcttgtacaggatttgctgtaaatccatgaaggaaggaatggtctgtttgatttggtctgggttggggttgtgagcacatgaggcaagacccaacactgggcttctatgcctagttaatggaatttcctttccctttgttggggcacaggaactagtgaaagatggggaatgtatagactgaagttacaaaagcctccctgtggtcccagaggttgtgtagtttttatttcttcattgtacaagaaaacaagaaactgttaaacttaaattggggcagaggggagctggaggccattcatctagctccatttgctctggacttgggaaaggcaacaaggaggccagggtgaaggtccttctcattcctgagagtgcctccctagccacctcacttctttggccaggacggagatgtgttcttgggagaccacacagcctaccccgtgcctactgcatggttccagaaggcctggcttccagagccagccatcagcgatcagaaactttctgcactgttaaatccatttaagaaatctgaaaacatggccttgcaggatgaggatgaggatgaggaaggggctgttacactacgtatgctttctgagatctaaaatgggagacctctggagtagcccttgtaattgagaaatgttttactttcattttggagccttatatgtaggaaagtagctgtataaacccacttgtaactatagcattcaaagattgatggtgctgaaagccggagaaagacacataaaccttggctggctatattaaatagctaaggactgacaatgccaagggagagaagaccaaagctctataaaccctactttatgacaccatccacagatgaactgcactgagggaatataaaccctgttatattacagtatccagggactaacactgctgagagatagggtaaatgatctctaattttgatttgagattataaatgtccagagaccagcaacccagagaagactaatcttggttggattttaggcttcaagagcaaaccccctgagatagtgaacatgagtattaggttagattctagagacagagataggttttgggggaatcccctggtgatttgtttaaaggtggatgataaaatctttcccagtcatttggcatgtatctcaattgccaacttcagaatagctttgtacagttttagttgtctatagtggtttgtttttacccccttttaggttagttggtgatgattgaatctgttgtgatagcaacttgatatataatttaaatcaatctrcatttttaaattaaatcttcctatgattcttttttccgattttaggttttcattgatcatttgtttgctttgtgattccagccagagaratgacacgggggaaattcctcaatattctagagaagcccaagaagtagcagctgcttgcggacaggatgtcctggggtccgaaaccaagctcccttccyggtgcacctctaacaatgcacacctcactgcttgcttgggagaggccagagggtgtacctccaggactgccctctcccctgctcctggcactctacacgtctgaggacattcagcagcaagagaagaatctgctctacccaaggatcattgcagttactcaatcaactttcagacttgaaccttcttagcctcggatattggtaacagctgagggcatatcattcttaaaggtcgaagtcctgctttctcatttctggaagtgattcaggagccccaggatcttacggttgatttgactcagtcatggcagtcagttgtgacatgttgattggatgggttcttttgaattgttcttgatctcttagaaagtgtttacgatgtgaggagaccagagaccaagtagattctggaccagaccatgcagcctgacctgtgaactctccagtatatactaagttcccagaatccccagctgaagaaaccagaatcttctcgaaatgtatatctgttttttaaaacttctatacctcttatgatagtcccatttgcttttcattccttacttcccagccccaccttctagttctgacttcgggcagagggatccctgagtccctcctggaattagcttgtatagtgaaaggcccatccaaggttgtctaaagaccaatgtgaaggtgacagaaaggacttttgagttctaattaatctgttacagcttcaagcaagaaagtcagtatagcctgaaagacaagagaaacgggatggtttataggagttcccatttggttgaaagctagaagccctaattgaccttaaagtaacatgctatrggatggtgggattgtcccctctgacagcacatatgaaatagttcatctatataatagaaacgcacacacacgaaaragaatcttctgacttaaatacaactttcatggagttcttcaccacttatctgtctctgttaaaatctgaaaatctagcccatggctaaaatctattatatgtgttctccatatttcttgtataagccagtccccagcatctgatgttttgagaagtgcatggagtttcctaaactttgcacaraagaatatcctggggccgggcatggtggctcacgcctgtaatcccagcactttgggaggccgaggcaggtggatcataggtcaaaagatcgagaccatcctggccaatatggtgaaacctcgtctctactaaaaatacaaaaattagctgggcgtggtggcacgtgcctgtagtcccagctactcgggaggctgaggcaggagaatcgcttgaacccaggaggcagaggttgcagtgagccaagatcgtgccactgcactccagcctgggcgacagagcgagactccgtctcaaaataaataaataaataaaaaagaatctcctggccaggcggctcatgcctgtaatcccagcactttggcaggctgaggtgggcagatcacttgaagtcaggagttcgagaccagcctggccaacatggtgaaaccctgtctctactaaaaatacaaaaattagctgggcgtgatggtgcatgcctatagtcccagctacttgggggcctgaggcacgagaatcgcttgaattcgggaggtggaggttgcagtgagccgaaattatgccactgcactccagcctgggcaacagagtgaggactctgtctcagaaaaaaaaaaaaaaaaaagaatatccctgtggcaatagtctgatggtgtttggacacaagaaaagttatggttttgagtcgtgagtgtttgctagggcatggcactcttcagtttaacagctgatccattaaaccttttctgacatttgtgccttgttctcatgctagaattaatgctggatttttctctcatttgaccatcaatgtagttttacttattgaaaggaaaaaagacttaacacaagataggaaagatgagtatgagaagtaaaacattctgctggggtgctacatagaaggttaggttgtaggggctttgattttaatttaaacttattatcgattgatatttctgtatctcactaaatgcggttgaagagtgtgtgtgtgtgtgygygcgcgcgcgcatgtggccaaaaaatagtgccataatgtcaaattcttcctttgctctgtttttgagagttgatgacatcaggcacttttcagtgtttggggaaattgattgggatacctcccccaaaccaactcaagtctgtaactggaagccaggtggttggttttctggtccgctttgtcctctttcttttaccgtcatcctattcaccagcacttaatgtaagtagatgttttagaattgcaatatttattggtttagtatttgtcatccttagaaatgttaatgatgtatttttatattgataatataaatttrtgtacagtatgtgtgtatatgtatttcaggatgttatagtattgtactttgtatgtgatggtttttgtgtcttcataataaatatgtcccttttacaggagggtgagtttttcctcagagggccgagttggatatttaaagcacagacctccccagaaagtacaactgtaatgataaataatctactgttttcccccttaatatacttaatggatagttgggggctttacagtcatctacttggtctcctgccttccattctatcctaccactgcccaacacccgaaagtagtatttagaaacccttaataccttcccgtgtctactaataaagtctcaatctcttgacccggcattttaagactctctacatgtaatcctaagcaacccttccgtttcgttttcttcctctcctatatatgaagtctctgttgcagttactctgaacagttcccagtttctcacttgagtgcctttgctcctgcctttgagttcctagaaggtcttggatcccttttgcatctagcaaacctatgcttcctataatctcctgatgatccagctggaaatggtccttcccctacattcctatagcatttacccatatcatccctgtgactcttaccatagtctgccttatatttaagtggtctgagtactttttctttttgagacagagtctcactctgttgcccaggctggagtgcagtggtgcaattttggctcactgcaacctctgcctcccgggttcaagcgattctctgcctcagccaccctagtagctgggattacaggtgcatgccaccacgcccagctaatttttgtatttttagtagagacgggtttttgccaagttggccaggctggtctcgaactcctggcctcaagtgatcctcccgcctcggcctcccaaagtgctgggattacaggtgtgagccactacgcctgacactgagtacatatcttattgccctactaaattcaaagcttctcaaggtatagctgtctcctgcacatctagttcttcagtgtctttgaactaggggttcaaaacctgtttgcttgcaggcttctggttacacatgatagattgaaaacaagtatttatctgccatcttctaaatcccttagtgtgggttccttttcaaccatgttcaagaactagaaaagaggaagtactcattattgctactgctatcactcattgatagtttacctgctctggaccagaatatgcccttttaaagaaagcatttcattttaaggaaagcaaattgcttctcatcataggcccatcatttatttccaaaaaagacatctggatgaacagtagatttctgtgatctagaaaagcatggctgattgactaagtagggacagtgttaggagtgttctaagtctttagagactatttttacggtaagtaattgtttattatttgcctacagatattttttcccttttcctttgccattccaaataccatcctgtaaagcatctgtcagctgtgagcagcagcattctgaaaagcatagtattggagcttggagacacatttgcaaattcttattgacatttttttcttaccagcactctcattatttcttgctgtcttcagtctcacagattctaggcctctgctgatttgcttggcctgccttccataggttagaacacttaaagttcacagggtattaattgtgttgatattgaaatgccatcattcatttttatctttccatttttgtcatattttttaaatggatgcttgctaactgctccgtggttttagttctctagctgctcttctggatgctcccagatcaaggcagtgaaaatggaactgatgaaagtcattcccttgtccctgtggcttcagaagtgtgtttggacttccacaggagctttgaaatgaagccgagaaatttcatttccagtgggattccctgacccctcctgtttcctccaggattaagacatcacaagaaggtgaacaggcagagcaggaagtgaggaaatggacagttgggccaaggtggatggtcgcagaaaccaaataacacagtctcttaccagttctcagcttctgcactaactccgtctccaagaatttggttatgttctccattttctgttttcttcatctcgtgagagctacaaggatacctggtccctatgtgggctttgtttcaccagagagtcttgcaacccccaaccccagagagtggcaaagggtggtgtctccacggttgtaagttctgatggactggaactgatttttcctatctatgtaggctttttggcatttggggtgtgtgtccttgtctatgcctaaagaggccactggccttcccaccctttgcctggcgctttttcctctcgagcagctgggggcttcagacgataccaggtgtaactgtgaggctcctggttggcgtgagtgctggcaaagcctgttaattagcacagaaacaccccagtgctccattagctgggccaggcatttggaaccttcccctcctgtgggccccttcctcctaatgagagctggaagaagggccctcacaaaacactgcctcagaataatattctgctttgtccccaccagtaaccagggctgacaggatcactctgtccatttctcttctaattagcacaattccagcatggcctgagccagcaaatagagaaaagcgatcaaaagcgatcggacaaccgtaccgaatcacaaacacaaagagggccattccctgtaattaggtgagacaattcctcagtcttttctcggctggagtttgccgctaagactcttgctgtttgggtcccagcaacacaagttacatgtctccctgggacactaataagccccaaattgtcttccgcttcacacaactctacccagaggacagacatggggtggtggggcaggtggcggggagggggtggggcagtgcagtgaggggacgggtctcccaacaagcagctgctgcaatgtttccccaacttcaagaagcagacactggggctgtgggcagagaggtaagagtcagttggcttgagagaactgctcttggcacagcctggcccctgtcacttgagctggagtctgaagcactgagaatttctgaccctcaggggaagccccctctcagctatttgccctactctgttcattcgctgcctcctgtctatggccccctcactcctcccacctctgcagactggtagcatcactccaggaactacattgagcccttcacaaactgtaagccctacacaactatagttaccattgcaaagaaagctaacacacagcacgtgagtgaattctgccctagaagactgcatgacctggaaggggcacccactgcccccctcactctggccttcatttctagcacccatcacctttatatccctgattgtgtccccaacccctgcctactatctcctctctcctgaaagatccctgtttttttaaaacagaaaagtggcccatctgccagggcaagaagctgtaactggccgcgctccatgtggctcagaggttggtcacttaatgaacaaaaacagctcccccaggattgcagcccattacggggattacttggggcgatacagccgtaaacttggtcatagccagggacaaaggaatgcaggggagagtggcagttggaatctcaattaaacccaagttcggagcagaattgggctcacatattttcatctctctcttgccctctgctttctgtctcgatctctatacctgatgtttctgaaagtgacctccaataccaaaggagattcagttatgtagaatctgaggagccaaaaaactcaagtaatcagagttgcattgtttttctaccttcagttttctgaggcacagagaggataatgataagatttgacttttaaaaataacttttgggacatgccaaagaattgatccaaatttgttcaatttcctacagtttctttggttataaacagaactacctggcacataataggtgctaaaataagcatttgttgaaagaatgaactgtgccttgacattcggtgttcatagcctcattgctggtctaagatatagtaagtgcttggattttgagagagaggcaggggtgatcttgtgtaagttacttctctctaagccttggtttccttaggactttttccactttaaagagtcatatcagcatcatggataagggcacaggctctgaagtcaggctgcctgggtgcaaatagcacctaactactagggtagctgtagagattaaacgagtattgcaaagtgttgagaatggtgcatggcatatcttacccattacgtatataattgcttgatggatagatctataaaacagattccatgtagtatttaattttttattatactcacatttgttaaaaattgacaatccctaggccggacatggtggctcacacctgtaatcccagcactttgggaggctgaggcgggtggatcacttgaagtcaggagttcaagaccagcctggccaacatggcaaaaccctgtctctactataaaaaaaaatgaaaaaatacaaaaaaatttagctgtgcagggtggcaggtgcctgtactcccagctactcaggaggctgagggaagggaattgcttgaacctgggaggcagaagttgcagtgatctgagattgcaccactgcactccacactgggtgacagagtgagactgtctcacacaaaaacaaacgacaaacaaaaaaaacattggcaatccctatagggaaaatatagtaacttctggttaccttgactagtcagttaagcagaataccatttctgtaacccttcagaagagctgacagtttactatttctcctacccccatccttccacccactgaggccctgtgccagcatggacactcagtagaaaccattgttgactctacagacagtggcattaagcaagggagggaaaggtatactttgtgacattggcaagtttctgaactgatactgaacttggcatacataagcctcaaatcactgtactttgctaatctttgtagtcctagtattttctgagcatccatgcttttccaatcactgcacaggaacacacttccctgtttgattcagtcataacctcctacccctaacccaccagtcctccacattcctccagatagttttctttttcctttcccttcccttcccttccctccttcccccactcctccccctcccccctccctgcctccctccctccctcccttccttccttcctttttttggtgagacagggtctccctctgtcaccaaggctagagtgcagtggcacgatctcagctcgctgcaacctctgccttctgggctcaagcagtcctcctgcctcagcctccaaagtagttgggaccacaagcacgtgccaccacatctggctaatttttgtattttttgcagagatggggtttcgccatgttgcccaggctggtctcgaactcctgggctcaagtgatccgcccacctccgcctcccaaagtattgggatgagccactgtgcctgggccagatagttttctatggtgtgagatttgtcaggttctcgcaaacctgtcaggtccctttccaggactaagcagggtccactcaggcttctgctcccgcagcagcctcctctgggctttgccttctctgggagcccatggagagaccctcgcctgactgcagcctgaggcctcagggtcaagcgaggctgaaggtcacatcccagggcctttctggacgcagccaagccccaggagccaagctggcctgagccagtgacttcacacaaaggagcagctgagaagagtcaagttgggaaagtcagtgacttgaggctgagtagaaatgagaagtgctggctgtggcaggacccatgagggatatgtgaggattggaaccagaaatgatctctgaggaatggtggtcggggaggctcatggggaagcaaggtcctgcgagctgcttcaccttggcctcctacttcccgccatccacctctgctgctgctgcctctgccttcaagtggcccaaaggctgttcagatgtgcagct

SEQ ID NO: 97680 - DNA, 58355 bp, Homo sapiens
cacattttttaagctggttcaatatttaggttctggctaactagctacctgaaaactgatagttattggctttgactggcctgggttaagtcacatgagggtcgagaaaggatgctacccacaaaggaaaaattcacggtgctattaacaaatggggttgtagatactgggcagacaaaaattattattatttgagatggagtctcgctcagccgcccaggctggagtaaagtggcgcgatcgcagctcactaaaaccaccgtctcccaggttcaagcgattctcctgtctcagcctcccgagtagctgggactacaggcgctcactaccatgcccggctaatttttttgtatttttagtagagacgggggtttcaccgtgttggccaggctggtcttgaaaaattattaatagaagtctacatttacacctgtaactatgcataaaactatctgatcagactcaatgtgttatgtcctaatattttaaggattaacagatattagaattctggaatggtttgatcttggaataccactcccgttatattctctgatcattatccttttcttcctcactgcagggaaagatttctggtattaaattataaagacaaatttgagcctggcattctacagctgagtcagtggtttaaagaaggaaagctaaaggtagaacttctattctttatcaatataattcttcctgctacttgatataattttgcattatttaaatgtactatagcaaacatactagtttcattataaaaattcctacaaaagaaaagtatgctgaatattataaattaactctacctcccaggtgagtataacctcctgatcaacaaacccttgcttgttattccctttatctaaaattttttagctttactttccatagattatattacaaaatcattaggttttcccccaaatgtaaaattatgtttattaatttaacaaatatttatgggatgctactatgtgttagaagctgtgctttctcaaaaataatgtgagcacctcctgatgcttataccaccatacttcttccctgtcctccctggacattctaatgtatgtcttagttgttgatcgaaaatcaggagttattaatctgggcttcagacatactggcctaggctattctttttttttttttttttttttttttttgagacggagtctcactttgtcacccaggctgtagtgcagtggcgcaatctcggctcactgcaacctccgcctcctaggttcaagcaattattctgcttcagcctcccgagtagctgggattacaggcacatgccactcgctcagctaatttttgtatttttagtagagatggggtttcaccatgttggccaggctggtctcaaactcctgacctcaagtgttctgcccatccagcctcccaaagtgctgggattacagttgtgaaccagtgcacctggactggcctaggctattcttgaaacctgcaaatgataagcaaagttgtacctttgtgtgcttctgtactgttctttttctgttttagagtgtatagcttgtgatctgttactaattgaagagattaaacaatgggaaaataggatattactttaaaaaatcaattgataggaagcttttctgggctacctacatgaaataaagaatatctatttttagacaaagtgctaaatagtattgctggcttttgtaagtatggaaactatcatatagaaacattgaagtttaaagactattaaatctagctattttgatttacagattaaagagacggtaataaatgggttggaaaacatgggaggtaagatgaatgtagacttattatatacacatgctcagcacacaaagataaagtctctttatttttatttatttatttttgagacggagtcttgctctgttgcccaggctggagtgtagtggcatgatctcagctcactgcaagctccgccttccaggctcacgccattctcctgcctcagcctcccaagtagctgggactacaggcgcctgccaccacgcctggctaattttttgtatttttagtagagacggggtttcactgtcttagccaggatggtatcgatctcctgacctcgtgatctgcctgccttggcctcccaaagtgctgggattacaagcgtgagccaccacgcctggcccttttttttttttttttttttttttttttttttttttttgagacggagtcttgctctgtctcccaggctggagtgcagtggtatgatcttggctcactgcaacctccacctcccgagatcaagcaattctcctgcctcagtctaccaagtagctgggactacaggcgtgcactggtatgcctggctaatttttgtatttttagtagagacagggtttcaacatattggccaggctggtcttgaactcctgaattcaagtgatttgcctgcctcggcctctcaaagtgctgggattacaggcgtgagccaccgcacaggccaaagtcttttatcttttaatgctacctctctggcctccccttccctgcccttccctcccctcacctcccttttttttttttttttttttttttttttttttttttttaaagagatgatcttgctctgttgcccaggctggagtgcagtggcatgatcatagctaactgtaacttatgaacccatgggctcaagcaatcctctcaccagagtagctggtactacaattacctgccactatgcccaaccttttttttttttttaattttccataaaaacagggtctcactatattgtccaggcaactcctggcctcaaatgatccttctgcctcagcctcccaaagtgctggaatttacaggtgtgagtgcctagccctttttttaatttttgagacagggccatgctctgtcacccgggctggagtgcagtggtgcgatcatggctcactgcagcctctacctcccaggttcaggtgatgctcccaccttagccccccgagtagctgggactacaggcacacaccaccactcccagctgatttttgtatttttagtagagatggggtttcaccatgttggtcaggctggtcttaaactcctgacttcaagtgatccacccaccttggcctcccaaagtgctgggattacagtcgtgaggccccatgcccggccttcactcacattttattcccatttttttttgcctctagtcttcagatactgtaaacaatgaacattgatgtgcataccagttagataccaattaaatctttccagtatgggcaaaacatttttttaagatgttaattgggttagtttgtgtgtaactttttacttgagatttcttttcatgaccattttcttctatgcttaatattcaaaatcattgaaaaagttatttaacataattttatatgttgtaccttttggaaacaagtatgatagtgacatttatcttttcagataacctactttctctttttccagctgcattccagtccatgatgacaggaggtaacattggaaagcagatagtttgcatttcagaagaaatctctttgtaattgctgtaaatgtcatcaaggcaatcatagatttcttttccattttgcatattttcaaagatatgttaaaaaatccttagactatacatagctcttgatttaaatgtgatcataggtgttatttttagttgcatagggtatttgatacaatcattaatggatcatacacaataggtttttaaaaattaataacttttagtaattacttttattaatttaaaatagaacgcttgagaggcactttgtaaagatttgttaaactggaaacgttttacatgatctgatacaaccattaatgaatcatacacaataggttttttaaaattaatattaataacttttattaatttaaaatagaatgcttaaaataaaatagaatgcttgagaggcactgagtaaagatttgttgaactggaaatgttttacatgattcttaaactgaaacttggtgtaaaaatagaattgagatggcctttttttcacattgtagactgaaaagagacttaatggtatgatgtgtacatagggactgggggcaggattgggggtttcggagcttgtgtaacagtttttgggataggagaccagcggttttgggttgggattagtatgggaagataaataacttaggttggttaagttgacaagatttactccagaggatcatctctttgtatttgccaaataatttactgtatagcctaaaaactccatatatattgagaaaagcatatgtttattttaggttagcaggcacatactgtcaagttgtaaagattgagagggcaaacagatgtaaacatcacttgtaggtgattaaaaagattgacagccgggcctgatgtctcaagcctgtaatcctagcactttgggaggcagaggcgggcagatcacttgaggtcaggagttcaagaccagcctggccaacacggtgaaaccccatctctctaaaaatacaaaaattagctgggcgtggtggcacacgcctgtaatcccagctactcaggaggctgaggctggagaatcatttgaacctgggagggggaggttgccgtgagctgagcttgcaccattgcactccagcctgggcgacaagagtgaaattccatctcaaaaaacaaaaacagattgacaacaaagacagtttcagaaaatgacaggactgggcaaattaacaaatgtttgtaaacatgaatgttcaggaactactgatgtacctcaaaagtttgttttattaattgtactcaaccctcgcagaacagtaaaactgaagattattgtttctgaatgttttggcttatgattgtctacacactgccaatatacttttgtatgcaacatttgtaataagtagattcaaactgtgttggtaatcagcctccccagttttcgtgagtggcccttttttgttacttttcctggaccatttcatcgcctgagggggtttcacttttctctgtatgttgctaactcccaaatctccatctgtatttctgacctctttcttgagcactggacctttacctccaagtaaatatcctcaactctggattgcatcttatactctgcttttttcttttcttttcttttttgagatggagtcttgctcagtcgcccggcgtgcagcggcacgatctcggctcactgcaacctccgcctcccgggttcaagcgattctcctgcctcagcctcccgagtagctaggattacaggcgcgtgccaccacgcccggctaatttttgtgtttttagtagagacgggttttcacggcgttacccaggatggtctcgatctcctgacctcgtgatccgcccaccttagcctcccaaagtgctgggattaaaggcgtgagccacggagtccggcctactctgcttttctaaagtggaattatcttcctctgaaatgtttctcctttattttaaatcaccattagtaatttgtgtacccaaacctgtcatcaaggcttatctttaaccttgaaaatgcctttttaaagagaactcctttaattcccacggttgagtctctcattcttccgcacgcaaatattttaaaataagtaatttcaagaagtcagtcaaactcacaaagctttaacaaggtggcatccagcttggaagtcaagtgttcaagcccgcagtcgggacatccaagagctctttacatcctaattacaacacggaacccagactcactgcataccccgtcccgtatataatgcaaaacttgattctgcaagttcctttctcgggcggtgaaacttcgaaggtcctctccatggagacctttgataaatgtttaagcagtgatcttttctttctcgtttgcctccattgcaacgcctccgctgatgggaaaaactactccctccgctactgcggggtggcagtgacgtcaacgaattagctgacctgttttttcgggcttcgcggacataggagtyccgaaggccgagagtgagtgagtgagtgggagcggggcggctgcggctcctcctgtccggggcggagccctgcgtcgcgggcctggggaggccccgccagcacccttgacgtctgggtcccgagcagtgcggcagccacacgacactgaggcgagcgagtgggtgkgtgcgtggggggtcagccaaacttcctgtcccgcgctcgagctgcttccggcgggagccggaagacgctgtgtgtggacggaattcgggaccgactgacggccggccggcttcccggaactggaaggtgagctccgaggtgggcctggccacccctcctcggttaggtagtacccgagagggcgggggccagtaccggctacttggggcctggggccgagttcgccccgagagaggaaaccgccctccttgggcatccctcctggatctggcgggcccgggagcggccagtctgaagccctgcggctttggcccttcccctcgcgggtttttaggggcgatgttcttgctcctttgcttggttttgggggtagggatataggaacagactgtcctgagaaagccagagtcagcgagtccccggggcgggggctcttggactgcacccgcagccggggcctgcctacggaccttggggccttatttctgaggcctttgtggtgtggggtagaggatgccaggaggccttgccctgaatgtttcagtccagagctaccctctcctttcataccacttactttctgggtttggaaaagggacagctgcctactcggctgggctgggtcgcccgtttctcctttgcctgtcagttcggggggcaggagtgtgtggattgtttacggccttcatacatttcgtgtcgaatttattttctgaagtttctcaagataatccaatttattaaagtttatcccacttgatcatgaggctcagaaatgcatttaggcaccatttggaagttaaatattattaacttgggacttaagaattagtacttaggttggaacgaaggtcaacgcagcatatttgcaataaataaaaaacatttggaaataaagtcgggcattttgttagggagtgagaaattgcacttggttttttcttagtgtggtgcagagtaaaagacaactaaagtagcagtcagaagttttaagttctagttttttacgttttgcatctaagtagatgtctaatttttggcaagttgctgaatctctagctctggggagtttttctgtaaacgaaggggtttacctttagggctatgacaatttttccgaggcactgaactttgagtagaagtgacataagcatttctttgttttggaaagataacttgaatggctgcataaaggatgtattggaaagaggaattttaaacgcggggtgaccagttagaggcctgttttaatagtatagtagaaagttactgagagacctaaacagggcattacagtagggaacagagaacattctgggaacagagaatcacgggaattatttaaaaatggagaatgagagagatttaaagacctagaatttgcagctgagtgggaggaagattgggcgatcattgaaataggtaatacaagaagaacaggtttggtaaggaagataataatctggattttggacattgttaggtttgagatgctgttggatatacatgtggagatacctagcaagcagttagaaatgaaggtttggagttcagaagagatgactagagaaaaatgtaggtatcatttgtagtgtcattcattcattatacaaatatttagtacctaccagttgcttactgggaagcttgtatggaagccctttaagctcatagtaaacacattagaagtgggaagtgaccgttaatgggcacagggtttccttgtgmggtgatgaaatattgtaaaattgatcgtggttctgcttgtacaactctgaatgaactaaagatattttaattgtactctttaaatgagtcaatagtatggtatgtgaacgatatcttagtgaaactaatttttaaaaaagatttacattgcagttttggaaatctgttgagtaaggaattgggaataggaatgtttaattgtgtatttgccgttacacctatagctaatgtacatagtacgttgctctgttaaagatgagatccccacagtacacttgataagatactgagtgctctagtacaaattcttttgagttcagttgcatatcttaatgcatcctgctattttttattttattcataccgtacacatacaaatcataaacttggacacaaaaattgtatggtagtacttagttataatatgaatacccagtgcttgagaaaatgctcgtgtyaatttttaaagattattgaagtgaaaacactgaaataaaaagatgtcatagataacataaaaaggacagtaaatagttgtctggttcctcagagattttacaatcctggaatctcaaagttggaggaaccttaaggatgacttaaacaacaaacatctgataatttcttggcttgttaagacaagctggaattggggaagaggaattcttgttttttttgagacagcctccatttgttacccaggctggagtgcagtggcgtgatcactgytcagtgcagcctcgatctcctgggctaaagcaatcctcctactcagcctccctagtagctaggaccacaggcatgtgccaccatgtgatgctaattgaaaaatttttttttgtagaaatagagtctcactggctgagatcgcgccactgcactccagcctgcgtgacagagcgagactcagtctcaaaaaaaaaaaaaaaaaaaaaagaaatagggtctcactgtgttgcctaggctgagaaaaggaattcttaggccatggagattcagggtcaaacctagagagatgtaatcactattcacgccaatgatttctgcatacttctggtgtgggtgggagtcctggctttgcaacttaataacttggtaattaagtaatatactgagccttggttccttcctctctaaatagagggatggataaaccatatgaaactgttgcagtgcttgaataagaaaaatatgtgtggaagaaaagtcagggatttatgatactttatgtgggaaacttggaaggagcatttccatttatatcttgtaaatggttagttttttttttttttttctcgacacagagtcttgctctgtcgcccgggctggagtacagtggagcgatctcggctcactgcaatctccatctcctaggtccaagcgattcccctacctcagcctcctgagtagctgggtctgcaggcacatgccaccacacctagctaattttttgtattttagttgagacggagttgcaccatgttggccaggatggtctcaatctcctgacctygtgttccgcctgcctcggcctcccaaaatgctgggattacaggcgtgagccactgctcccggcctaaatggttacttttttacaatgaaaaatgakgatttcaggyagcttagaaagagagagggagaaaccaacaggacaaaaaaacatttattcagttacttttttttttttttgagatggagtcttgctctgtcgcccaggctggagtacagtgacgcagtctcagctcactgcaacctccatctctcgggttcaagcgattctcctgccacagcctcccgagtagctgggattacaggcacccgccacatgcccggctaatttttgtatttttagtagagacggggtttcgccatattggccaggctggtcttgaactcctgacctcaggtgacccacccgcctcggcctcccaaagtgctgggtttacaggcgtgagccaccgtgcccagcctaagtgccctctttgtaaagtctgtcttgttctacctttccacactacctggtattaattggaaactttaaagtacccattgattgaaaatatacccatcctggatacattttacactgtatgattatttgtaatagtgctcccaattttagtaacaattgtacaaaataaaatggactcacattccaaaatcctgaaaagaaactaagctataagaaagtaagaatttaagttatagggagtggctgggcgcagtggctcacacctgtaatctcagcactttgggaggccacggcaggcggatcacctgaagttgggagttcgagaccagcctgaccaacatggagaaaccgtctctactaaaaatacaaaattagccaggtgtggtgtctcatgcctgtaatcccagctactccaggagtctgaggcagaattgcttgaacctgggaggcagaggttgtggtgagctgagatcgtgccattgtgctccagcctgggcaacaagagcaaaactccatctctaaataaataaataaaagagagagaacagccgcatcagggtcctgagagcactacctttgggaaacgctcttcaaattttaacttttttttttttaartgtaattttaaaaattatcaaaacaatatggttgccttttagaaatattggaaaattgagaaaagaaaattaagtcacaccagcctaccacacggtatagctacggtcatagctgtatgaatctccttttactttttctgatgcttattataactagttttaataatagcaagtatataattttgtattttatttttataatttaacatgtcagtcacttgttgttgcattgtcttcatagcatttgtttgttggtttgttttttgagatagagtcttgctctgtcgcccaggctggagtgcagtggtctgaccttggctcactgcaacctccacctcctgggttcaagggattctcctgcctcagtctcccgagtagctgggattacaggtgcctgcgaccatgctcagctaatttttgtatttttagtagagagggggtttcactatgttggccaggctggtctcgaactattgacctcaagtgatccacctgcttcagcctatcaaagtgctgggattacagttgtaagccaccacacccaacccttcacagcatattttgaagtgacagtgccatatttaatcaaccattccctaattgggggtgtgtgtgtgtgtatacattgcttccagttgtttattacataggataagacggacatctttggacatagctctatccatatttaagatagttttttagattattagaggttgaaatactgcatcaaagcgtagtatytttatgggttttgatgcctgttgagcttgttgtattttaaaagaagtgtttcggtttgaattctttatttgcttgcttgttgtgattttttttgtatatgtaaagaagtgtctttatgtacctgtgttttcccactgctcttaatgccccctctctcttttttacccctattctaggttacattgattacccacctagtacaacatcttacgggaagagcatagtatttcctagaggaatatgaacataacaggaaggtatcattggctctgaattaaatttgaacttgtcccctgaatagctacaggttttggaagctgaatcaatgttatcagatgagttagaatccaaaccagaggtgagcccagtcagcttgtttccttttcttttggtgggctatatttcaaagtttatcttcagtttagggggtcagcaaactttttctttaatgggccagataataaatattttaggttttttaagctatatggttttgattgttactattttttcaaagatttaaaaattatattttttgtgattgtttttatatctgtttttcagtatatgtgaaatcatacatttagataatgtaataaaatcttataaataaaaatatatgtttatgtataaatatatacataaatatgagatacatgtgatgtataggtgtataagtatataaatatttactactacaaattcttttgtttattttatatatatctgtaagtattttctttctaaatgtgattggggatttaaacattttttgttgttcacttttcttactttaaatttagcacatctgtgttgcagagtggtcactgaatttggaatcagattacttaaatttgaggattggcattgctcctaactagtcttgtgaccttagacaagtcacttaatgtcttcaattttattcctcagctgtaaaatacgccttaagtttgggtgcggtggctcacgcctgtaatcccagcactttgggaggccgaggcaggtggatcatgaggtcaggagttcaagaccatcctgcctaacatggtgaaaccctgtctctactaaaaatacaaaaaaaattagctgggcgtggtggcgggcacctgtagtcccagctacttgggaggctgaggcaggagaatggcgtgaacccaggaggtggagcttgcagtgagccaagatcatgccactgcactccagcctgggcaacagagcaagactctgtctcaaaaaaaaatacatcttaaatcttactgggttaatgcgataattaaatgagccagtacacagaaaagtgttttgtaaaatgtaatcaatatgatgcagttgattttttttaagccattattttaaaatgtaattatttttatcatttctctgtttgacagaaggtggcagaggttaacttaattacagtgaagtgtcacttagcgatagagatacattctgagaaatatgatggtagttgatatcattattatgcgaacatggtagagtatacttacacaaacctgtatggtttagcctgctacactctaggctgtatggtataccttattgcccctaggctgcaaacctatacagcatgttactgtactgaatactgtaggcagttgaagcacagtggtaaacattgtgtatctaaacatatctaaacgtggaaaaagtacaataaaaataggatattacaatctcacaggaccatcatcctatatgtggtctgttaactgaaatgtcgttttgcagcacatgactttatataaatcagctgttctctagaacagagaacttgataaaataactttagatattatgttgtttagtttttgtttgaatatggatgagactagtgaacagtcttaatattatcttttggtaaattcaaaggtttagatacatttctaacaactcgtatttctcagtgttgtcttttctccccccagctcctggtacagtttgttcagaatacgtccatcccattgggacaggggcttgtagaatcagaagctaaagatattacttgcttgtccctccttcccgtgactgaagcctcagaatgcagtcggctaatgttaccaggtaaaaattaagatcactagaaataggataaagaagtcttaagagcttagcctactctatgttactggtggaatgaatatatcgtttaataactgactggtggaaactgtaaaaattaggagtcatggagaaaaagcaaccatgaaatcattagtgcattggtagtttaagccataggaatggatatgatcacccagagagtgtgagagtggggaaaaaaggtcagtgcaaaactatggaactctttatttaaggtacagggtagggcaggagaacttgtaaagragggaagaaacaaagactaaaatagttggatgaacatcagcagagtggaggcatgaaacccaggagaaatcattgtatcaaatgctactgacaggcccagtgaaatagggactaaaaggactccattattgactttggcagaacctgttccatggagagaagaggatggaaagtcaggctgcagtgacttgagtatacatacttgcttttttttttttttttgagatggagtgtcactctgtcscccaggctggagtgtagtgacgcaatcttggctcactgcaacctccgcctcccctcccaggttcaagctattctcctgcctcagcctcctaagtagctgggattacaggtgcgtgccactatgcctggctaatttttgcatttttagtagaaacggggtttcaccatgttggccaggctggtcttgaactcctgacctccagtgatcagtccgccttggcctcccaaagtgctgagattacaggcgtgagccactgcgccaggcctatcaatacatactttctaaagtctctcctggtacgagaaggaaaaagagaaggcggtaagatagagggaaattttttgtttgtgttaagatctgagatatttgagggttgctttatgctaaggggaaagaaccagttagaaaagttgaagacaggccaggtgtggtggctcgtgcctgtaatcccagcacattgggaggctgaggcaggaggatagcttgagcccaggagattgagaccagcctgggcaacatggcgagacctcgtctctacaaaaaattaaaaattagctgggcatggtggtgtgcagctgtagtcccagctgaggtgggaagatcacttgagcccaggagtttgaggctgcagtaagctgtgatcacaccactgtactccatcctgggtggatagagcaacaccctgtctaaaagaaatagtaataaatttaaaaaatatatgtataaacaaacaataattaaggaaatgaaaacaacagcgttcatcttcccttagaatgactgttatcttaaagatggaagataacaagtgttggtaaggatatggagaaaagggaacctttgtacactgttggtgggaatgtaagttagtacagccattatggaaaccgtatggaagttcctcagaaaactaaaaatggagccactatatgacccagcaatctcacttgtaggtatatatccaaaggaattgaaatcagtaagtcaaagatgtctatacttacatgttaattgcagcattattcacaataaccaagatatggaatcagctttagtgttcatcaactaatgaatgcatttaaaaaaaaatgcattcaccttcttttccacatttcttttagttttaattttgatttaaagtattttagacatacaagtatagataaaagtaaatgaaaatccaaatacttggcctcccagctcataaaacacaatattacaggccgggcgtggtggctcatgcctataatcccagcactttgggaggccgaggtgggtggatcacttaaggtcaggagtttgagaccagcctggctggtgaaaccctctctactaaaaatgcaaaagttaaccaggtgtggtggcacagaaaaaataaccgcagcctgagatacaaccataggtaaaaaggtaatggcaaaaactgcaatagcttttgcaccaacctaatacaaaagttaaggagagggagctctctccaggaaaaataaaatgtagatcctattcttgagttagtattcattgtatagctatatttttcaaggagaaagtactgatttctggcctcaaaaaggactaaattctgtgatgtccaaatgttgaatggttggttattcaccaaccattactgccaagtgacagagaattctgttcctcacgttttggctgactgcctttggaacataaagccatctctctgttcttctgtgagacaaagtttttatttgtgtaatgagaatgctgtctgttgctataaggatgttagcttccmagagatgttgggtgctgtgtatcaaaatggtgggctcctagagataggtgctacataaagctgtggtattttccctttactagatgatactacaaatcattctaactcctccaaggaggtcccttcctcagctgttttgagaagccttcgggtgaatgtgggtccagacggagaggagacgagagctcagactgtacagaaatccccggagtttttgtccacttcagagtcttctagcttgttgcaagatctacagccaagtgatagcacttcttttattcttcttaacctaacaagagcaggtattctttccttttttttgggctctgcttatgcctaagaaaaaaattaggggtggggcatatttaamttagtcatacttaaaatagaaagaacctttattattttattattttggagaattggtgtgtctggtgaccatttgaatatgtagagrgagagggaggactctagtatgactcatatcttgtttgggaaattatgtagtgccatttactgagatcgcacaggaagagcaaggcttgggggaggatgattagttccaatttgcacctatttatgttgagattttggaggtatattcaggaggacatgtcctttagagagttagaaacatgaatccagagttctagaaaggtctgttttggtgcttatcagcattcaggaaacgtatgaaacaatgaacatggattctagagaagtctcaagcataaacagaaaagaaggcaagtctgggaccctgggaaaaaacatttaagaggacaacagaacaggaaggagcagctggaaggggatgaagagaactgggagagagtggtagcagggaagccaagggaggaagaagttttaaggcagaaaagatactaaatcatgccaaatactacatgatgggcttattagtgagaagaagtgtgtgtctggtgaccctagcaagagcaattgttactgtggtagctgaggtagaggccagggttaaagagatggggagtggatgggaggtaagacaatagatacacaagttagaaggtacacttsttcaagaagcttgactttaaaggaacagggaagaaggtaaatagctagagaagtacttggggttttctaattctttttaaaaataagggtgagagacttgagttaggacatatttaaagacataaggaaatgctggccgatagagaggaactagttgcagataggagagaggagataacacaagtatatatggggggataattgaagaatgagaatgaaatacagtaggtggggattagtctggttgaccaagaaagacagctttgccttgaaaccagaggaggcaaggtaatgacaagcctgtagactaaaggtagaaagatgatagcctgctcttcagtgagaagtttgaggtaaaaggcgaaggtcaggaatagcttatttaggasatggagagtttctgggccaggcgcagtggctcacgcctgtaatcccagtactttgggaggccgacgtgggcgaatcacgaggtcaggagttcaagaccagcctgaccaacatggtgaaaccccgtctctactaaaaatacaaaaattagccgggcgtggtggtgcatgcctgtaatcccagctactcaggaggctgaggcaggagaatcacttgaacctgggaagcggaggttgcagtaagccgagattgcgccactgcactccagcctgggtgacagagcgagacgccgtctcaaaaaaaaaaaaaaaaaaagggacatggagagtctctgagccagggcaaataaaaagcttgcttggtttctaacttttcatatattttgtttcttccaggtctgggctcttcagctgagcacttagtgtttgtacaggatgaggcagaagattcagggaatgatttcctctccagtgagagcacagacagtagcattccatggttcctccgggttcaggagttggcccatgacagtttgattgctgctactcgtgcacaactggcaaagaatgcaaaaaccagcagcaatggtgaggcccgtcggcattttccttgccactattctgtgcaaagagattttggtaatgcagtggctggtttgagttgtatataatttaaattattctattgatgagagcagaaggctagaaatctgtaaattgtttaaattttattttctataaaataacttggtcatgccagatttgtgttcaaaaccaactagtattctgaattctcaactttaaataatgtacagagccccttttaaagaaaaaataatatacatcctggggtttgaattgtttttattgtaatgtctcttaaatatgcaaaaacataaattctgtgtaaacttcatrtacttagagctcttataccatcatgaaatcaaaacagtttttatcagttaataggaataaaactaccaaatccatgaaaataaaaataacattaagtcattgtggcagaggattatgttttgctgaaactaaattgctgctcatggcagtttaacaattagctatgatggttttaatgctttttcttttcagttcagcatgcctatactacttactctgtgtcacttttctctgttctagtaattttcaaagcattgtcactggatcattgacgtcacgtgggaactgagaaatataaactctcaggcccatgccagacctactgagtcaaaaacttggttctgatacatgttaaagcttgagaaccacggctctattcagaccactgcagaatctttgcttatgtagcatgtcatggatacttttttaggtctgcctctgtgttttctcattaacatgtgacacaactcaatacaacatggtttaatgctatcattatcacaaactaagcttaagcacttagtacacagttgtttggagtttatgcagattatctagtatatgcttattattattttttgattaccattcaaatgaaaataaaaagttaaaatttctcatagagaactagagttccctatgaatattttgaaacattaaatcttttttttytttggtctttttttttccctttttatggagaatgaggttttgctctgttgccagacaggtctcaaactcctggactcagggtctcctcctgcctctggctccctaagtgctgggattttaggtgtgagcaaccatccccagccaaactctaaactrtttgttttcaaaatacttagttctgtttatgactaccatagtgctacttagaatggttcattttaacattttggtgggacccttaaarttcagattcttcctgagatatatgtgccaatctccrgatgctgaaaccttcagcatttcctcttacattgaagaaatagtgtcatatttgccaatgagaagcagcgtagggaggggagcttgcaatttagaatctgggagccctgggatccaggcctggcaccatcatttactggttccctgccttgggcagtttaacctcccttagcttcaattttcttacgatctgaacatagagatcaggcagctttcctgactggcttgttatggagattatgtaacattctatctgggaaatgttataatcagcaaagcattgtgtggatgtttttcttactctcaaagtatgttgccttactatcttaacaactactttgtatgcctgaatataaaatcaccccaaataggctgggcattgtggctcatgcctgtaatccctgcactttgggaggccgaggcaggcagatcatctgaggtcaggaattcgagaccagcctgaccaacgtggagaaatcccgtctctactaaaaatacaaaattagctgggcgtggtggcgcatgcatgtaatcccagctactcaggaaggctgagacagaactgcttgaacccgggaggyggaggttgcagtgagtggagatcgcaccactgcactccagcctgggcaacaagagcgaaacttggtctcccaaaaaaaaaaaaaatcaccccaaatataagacaatcttttattttccaacaagataataccctaaaagccttttatttttttctaacttagttatgtaaacttttaagcatgtagataaaattaacattataggttgctatttggaagctttatgattttggttatacatacacattttaattttttttttttttttgagaccgagtctcagtctgtcgcccaggctggagtgcagcggcgcaatctcggctcactgcaaactctgcctcctgggctcaagtgattctctgcctcagcctcccgagtagctgggactacatgtgcatgccaccatgcccagctaatttttgtatttctagtagacacagggtttcaccgtgttggccatggctggtctcaaactcatgacccaaggtgatctgcctgcctctgcctcccgcagtgctgggattacatgcgtgagccaccgtgcgtggtcccacatatacattttaaatcatatgaaatatatcaatattgctttcacccactaacacaagcttgtccaacatacggcctgtgggccacgtgtggcccaggatacctttgaatgcagcccaacacaaattcgtaaactttcttaaaacattatgagatttttttgtttgtttgcttttaaagctcacyagctgtcattagtattagtatattttatgtgtggtccaagacatttcttctttcagtgtggctcagggaagccaaaagattggacacccttgcactaacatgtaatgaagtgattttattcaatattttaatgcatttttaacataaatatttttgtcattgttgacactgaagtcactttatgagtcctctagcatagtttttcagagcatgttatcttcacttacagtctaagttgtttgaaatacagaaacgttttaattttgcataagatgttgtatatcagatcagcaaagscctttgggccaaatccccacctgtttttataattaaagttttatgggaacataggcatccacattacttacaaattgtctaaggctgctactatggcaaagctgagtagttgtaacagaaaccatacggcagccgggcgcagtggttcacacctrtaatcccagcactttgggaggccaaggtgggcagatcactggaggtcaggagttcaagaccagcctggccaacatgatagaactcaaatacactcttttctgagggatttttttttttttttagggaaaaatttgcgttatatttatttgaccatatattgataatcttcattcttgagcaggaggagtttcagtgatttcttagccttgccttattctatgtattcatttttcctattttatgattatattaatattcttattgtatctataaaacrgaatccagaaagcccctactatcactgatttgaatcactgtattagcatgatttttttggccggtgcagtggctcatgcctgtaatcccagcactttgggtggccgaggcgggtggatctgttgagctcaggagaccagcctgggcaacatggcaaaaccccatctctacaaaaaaaaaatagaaaaaattagccaggtgtggtagtgcacacctgtctctagtcccagctacttgggaggctgaggtgggaggatctcctgagttggggaggtcgaggctgcagtgaaccgagatcatgccactggattccagcctgggcaacaaaatgagaccctgtctcaaaaaaaaaaraagaaaaaatttaaaagaaaaaagcatgatgttaacagacctttcattagaaatcaattagctggagttctggggttggtgggaagattccttcacggcatatgtatttttgtgctatatgtgtagttttttttttttttttgaaacggagtctcgctctgtcgcccaggctggagtgcagtggcgcgatctcggctcactgcaagctccacctcctgggttcacgccattctcctgcctcagcctcccgagtagctgggactacaggctcctgccaccatgcctggctaatttttttttttgtatttttagtagagacggggtttcactgtgttagccgggatggtctggatctcctgacctcatgatccacccacctcggcctcccaaagtgttgggattacaggcgtgagccactgcgcctggccctgatatttttcaagtaaacacatttttaaaaaccttggggcaatattaaagaaaaacttaatagtaactagcaggaagcatcctaggttctgctctgaccttggagcaattagttttatgactagtatttggtaaagtatagcaaggagaagattaatagatgggacagaaactgcctttgattaaccatcaggttctaggggctgtgataggcacaacatatatattctacttttggctattgagggggaaatttggagatacaaatcttattgctaaggtatatatagtggaaagatacactgcctgcatatgctcatggcagaattaaatgactattaatttttttctctattgatgttcaagtatttcttgaagaaagtgaaagaaaaggaccaccacctgctaatctggaatttatataaaaatttttaagtaactgattttgtttacatttaagggaggcactttgtactcctctcctcacctctctttattctgttgaacaaaactccagtagatattttctcttactttttaaaatgtggttagaaatttaaaaatcatctgagtttttgaattccttaagtattttataactaaagaagggtggtacaggaaattggaaggtggttcttagtttgcagaatgacaagaaatagccaaattcctttcagaagatggaaatctaaaaatggctgtcagagcccacactgaaccagaatgactacttcttcttaaaatacagtgggattttttgtttgtttgtttttgaaacagggtcttactctgttgcccagactggagtgcagtggtgcaatctcggctcactgcagcctccgcctcccggacacaagcaaaatacagagtttttattactcagaactttgtcatctttgtagcaccctactcagggatagtgttgctatccctgcttctccaccaaactgtgtaatgcaaaatggttttaattctgatttctaatagcaaaccattttggatatctcttacatttgtcaaagaggcctagtcttgtgaaacaaagcatgatagtttttggtagtttttctggagtaagggaatgaggatgtagaacacttgcatttctattgtttcattatatttatttattttttgacagattcttgctctgtcacccaggctggagtgcaatggtgcagtcacagctcactatagcctcaacctcccaggcttaagtgatcttcctgcctcagccttggagcctcaactacaggactgcgccaccatgcctgtctaatttttgtttgtttgtttgtttgtgttttgtaaagatatggtttcaccatgttgcccatgctagtctcggaacacctgggctcaagcagtcctcccaccttggcttcccaaagtgcttgggattataggtgtgagcaccatgcctggccaagtttctgctgttaagtgcatacaaagataactggggaagatgaagatagatacctgattaatgatcactaggagtaaaatataggagctttattgtttgagcctaagtatctgagtagggtctttccctggattacaaatatgtgactctgttacaggagaaaatgtccaccttggttctggtgatgggcagtcaaaagattctgggccccttcctcaagtggaaaagaagctcaagtgtacagttgaaggttgtgaccggacatttgtatggccagctcactttaaataccacctcaagactcatcggtgagcaaatccgagatctcatatttggatatacgttgatgcaaaagttgattcttccagaggaacttgcccctcaggttgacaaattacaggaaagtagggactccagttaacttctggttaagatatctttttttctttaatagaaggatttgcattgtctcatttatctcattcttgataaatatttaataagacatttgggacctaaaggccttaaaccaagagttctcaaattttattataaaacatatttcctttgagaacttaaaagtaacaaataagcatgggctcctaccttgaacctatgagatcagtttaaggggtggtgctaggcatctgtagttttttgyttgattttttttgtttaagagacaggatctcactttgtcacccagggtggagtacagtggcgccatcatagctcactgcagcctcgaactcctgtgctcaagtcatcttcctacctcagcctcacttgggattacaggcttgcaccaccacacctggctaattaaaaaaacattttttaaagacagggtctcgctatgttgcccaagctgatctcaaactcctgggctcaagtaatcttcctgcctcagcctccagagtagctgggattacaggcgtgagccaccacccagctrtagttttaacaaagtcttcagttgattctgatatatccagtttttggacttactgtttgccttgagagtcaataggggctttgacttgtcatctctagcaaagagtgttttcagatatttttccttatgtgattatttttgcagaaatgaccgctccttcatctgtcctgcagaaggttgtgggaaaagcttctatgtgctgcagaggctgaaggtgcacatgaggacccacaatggagagaagccctttatgtgccatgagtctggctgtggtaagcagtttactacagctggaaacctgaagaaccaccggcgcatccacacaggtgtgtgcagcaccaacattcctttgggcagtctgctccttggctctgcatgtttgcctctccttaggaargactcaagtgggaatagaaatgaaggtctggggttgttgctagaactctgaagatgggatttctttttcaaatgacttgttgcacttataataacatttattgtatttttacctgtgtgtgtagagtagacagtgttgatttctgttttcaggagcctaacctgcagggagagctgtaagaccttctcagacaacaatgatgtggggagatgtggacaaaatcagtctgtgttcaaatctttctgaacactgcgcagttatgattttgggcagtaacatttactgagtcacacaaaccatacagaacctgttctaggcactaaatggggcagggtgggaaaaaaatacaaaagataagatataatccctgactttcttgttagagcctcacaacgtgagaaacagaatagagaagtgaattattctgggtcacacagtatgttaatatcacaggagcaaaataaagattccttgactcttaatctaagagtctaagggtgattttccaagccacttggtccagcgtgagctagtctctagccaaagtataatcactgaacccacaccactcttagaatgtgtaactattcttccccacttacttgccactttgactcttcttgattcttgcattggcaaaatgacagcaggtaaaattaaaaggcatatatatggcatatataaaatgcatatataaaaatataaggcatatataaaatataaaaataaaaggcatatatatacatacatatatacacatacatatatatacacatacatacatatatatcacacacacacacacacayacacatacatatatatatatatatatatmcacacatactttttttttttttgagatggagtcttgctctgttgccaggctggagtgcagtggcgagatctcggctaactgcaagctccacctcctgggttcatgccattctcctgcctcagcctcctgagtagctgggactacaggcacccgccaccaggcccagctaattttttttgtttgtatttttagtagagacagagtttcaccgtgttagccaggatggtctcgatctcctgacctcgtgatctgccctcctcagcctcccaaagtgctgggattacaggcttgagccactgtgcccagcctatactttttttttttaattagtcaaatgcagtagtgagaagaggggaaaaagtaaaacaaggcacttgatctgtaactgactgtgaacatcagttgagataactcactaccttcagaccagcccattgttgtagcatttgatacctctgaacatcatcttaaaatgctttcttttttcttatttatttatttttgagacggagtctcactctgtcgcccaggctggagtgcagtgatgcgatctcagctcactgcaacctctgcctcctgggttcaagcttttctcatgcctcagcttcccagtagctgggattacaggtgtgcaccaccacgcccagacattgttgtatttcttgtagagaccgggttttgccatgttggccaggctgttctcgaattcctgacctcaagtgatccgccgaccttgccctcccaaagtgctgagattatatatgtgaaccaccacgcccagacttaaaatgcttttacttcaaaatatgacctgattttcccgttgtttttttttctctaattctttctagcttttatctctgttaatctctgaatgtttcaccagtttcagaatttcttgttccttctcttttactcagtgtactctcttgtcataatctcaggcctctatttaattatttctccctagatgcctcacagatctgaatctcaataataattaatataataataaaagttagcatttgttgaggcactttagtatgtaccaaccacatatacattatctcatttaatctttaaggtaactttatgcattagatactgtacttattgataaaggaacagaagattagagagagaagtaacttgcccaacatcatgcaggtaggaaatggcagagctggaatttgaattctgatatgaccccaaagctcttccaaggattttatttttaaatgctgacaactcagtttatctcaaatgtcaaaattgacctcaaagctttattagtagtaatgatagtaaagctgcagttcaggtcgggcccagtggctcacacctgtaatcccagcactttgggaggctgaggtgagcacatcacttgagggcaagagttcgagaccagcttggccaacacggtgaaaccccatctccactaaaaatacagttagccaggcatggtgatgggtgcctgtaatcccagttactcgggaggctgaggcaggagaagtgcttgaactcgggagttagaggttgcagtgagccgagattgcgccactacactccatcctaggagacagagcgagactccatctcaaaaaaaaaaattttgactgggtgcaatggctcatgcctgtaatcccagcactttgggaggccraggcgagtggatcacctgaggtcaggagttccagaccagcctgaccaacatggtgaaatcccatctctactaaaaatacaaaaattagctggggcatggtggcacatgcctgtaatcccagctactagggaggctgaggcaggagaatcgcttgaacccaggagacagaggatgcagtgagtggagattgtgccattgtactccagactgggcaacaagagcraaactctgtcttgaaaaaaaaaaaaaaaagtaaatctgttaattcagtggcttactatgagggcttactatgtgccaggcactatgctgaatatttacctggtattatttaatcctcaaaacactcttttgaaattgtattatctccatattgtagatgaaaagctgatttttagagagattaaacaccttccccatgcaaataagtggtagtgccaggatctgaagtcagaattggattaacagaccccaaaggccatgtttttcaccattttgctgcattgtcttttaaacctcttccttctcctgtgtccgttatcccagtgaaataaccatcctctcaagtttccaaataggcaggtatgtcccctaaccagcttgatgcagagatttcatgccattacattcttatgtagaatctttttctaaatcctttttgttttttcagttctttagttcatcttttgaaacatttgatcttgttattactaaaattttttttttacatttgttctgttatatatattagtatattgctcattctttcaataactttttgagtacctagcattctgagggatgagtatacaattaaaacattgaaaaaagctaccggtggagagtctcaaacattaaactgtgtggtacagtctaaaagaatagtataatctarcagtgctgttccctcccakaaagctcagctcccrtattgtcactgtgccagccttactagccattttctgaactttccccgggcactctgtttcaaggctctgctcacagtattcctggtgcctgaaatttccttccatccttgtcatcttttagatgaactcagaaattcagctgcttacaaaaattactgcaacggagcacttttttttgtatttatgaattcatttgtctgtctcacactagtttgtgacccttggaggatagagactgcatcttttttgtttgtttgtttttttgtttgagacagggtctctctctctgtagcccaggcttgagcccaggaatttgagatcagcctgggaaacatagtgagacttcctctccaaaaaaattatacttttagatggatctacaaactgagtcataaagaaaattgatgtaaggtaaaaatcctgacagcatatacagtattaatcttgatatcctcagatggtgggagtcactgaagaaggtaggttaatgcaactctccagctcttgggccaggagggagaaggaaatataggcttacattccaaggaaaagggcaaggctgtctggtggsatatatactaaaagatcattgagaggcaacacttgctaggtagcccagttgaaattataacatgaattaaataaatcagagtaggtaagtcattmgactctgaataaagttggtgggaaaagagagtaacaggtaatcagttcatcagaagactgagtctttatctcattttctgtctctaggagagaaacctttcctttgtgaagcccaaggatgtggccgttcctttgctgagtattctagcctccgaaaacatctggtggttcactcaggtatcagaacctctgccattcatagattttaggaaaagtagacaaaagaataaaagggttgtgggggtgatataaagacaactaaaaagaaacaaactgttcactataaagatagaaagcttctcatcatcatgacagaatcagaaatcaaggcccttaattcttataatcaaggttgggggggggacatctaattattattttcagctgtgtttctaataaagccttcttttgaagagatcagcaaatttgtttggcactctgctgggtgctttataagttacataaaacatggaccctcttctttaggaattgacatttttatccttggggaggatttcatatcagaagaaagtaaaaagactgatataagttgtagcagcaccagtaatattactgccttctgagcaggtgttagtgatcctgcttgagtcaccattttggcagaaactatgcctttggcaaacagaaccacaaaccttatcattgcagatgtggagaagagaaaagaggagtaagatttagtgacccattttctgtttggagccttaaattaattccctgcaattctgtcagtttgctcactctgtgcagatatatctcatcctctcaaccagaagtcaggtacagcgcagggaaaagcctgtatcttgttagaaggacttttttcctgtaggacatggtgatttacttggaaaacaagatggggaaggtagtttaagaagggcctaaaatgccaggaaggagagtttgtggagcctactggaggtacaacctgatgagaacttggcttactgaagatttatctggcagtgatgcagaagctaaactaaaacaggaagagatgagaagactttttttcagtctggtcaagaagtctgctccagtgtagtggcagggagcatggaaagagacccagtggaagaatctgttcaactccacaaatgattggctggctataaagttatacagcaatggaggcagcaggtgaggattattgatgaataatcaataatcagaagcatggtagtggcctggcgtggtggctcacgcctgtaatcccaacactttgggaggccgaggcaggtggatcacttgaggtcaggagttcgagaccagcctgaccaacatggtgaaaccctgctgagattagcctactaaaaaaataaaaaattatccgggcatggtggcacatgcctgtaatcccagctacttgggaggctgaggcaggagaactgcttgaacctgggaggcagaggttgcaatgagctgagattgcaccgttgcactccagcctgggcaacaagagcgaaactccgtctcaaaaaaaaaaaaaaaaaaaagcatggtagtttcaggaggttgaggctgcagtgagttgtgattgcgccactgcactgcagcctgggtgacagggcgagaccctgtctcaaaaaaaaaaaaaaaaaagtggtagtgaagataaggagggaaagggggctttccagttgtcaggctgactcacatatttataagaggggttagaaaaatgttggatgatgagtgctagaggggctctgtagactagccttgtaagtttgttggaggtgagaaaattcctggcacacaacagctttttagaatttgttgattgaaccaattagaatgaataaaaggattgctaagtaacagtgaatgaggacatagctgagagtaagtagcataactttttttagtagacctgttcagattttattacttttctctgctactgcttaacagtttaaaagctgggtactggagaaaataggtgatggaggttaatcagagcagaggcttgctgaggaagagatgaactcaaggaggagagggattctagaatggaatcaggtcattgttgaatgactggccgtgggaaacaaggggaagccagaacatgacaagtggagaggaggaactggaaagttacttatgaggaaagcaagctactgcagcaggagcaaggaagttggagagttayaawcaatcagggatgtacatttcagagttgagatcttagaagtagagcagttttttaatatgatgacaagttctaagcagaggtggcaaactggtatcctgtaggctagatgtggacttcagatgtgttttgcttggattgtagagcgtttttattttactttactgtgtcagattatgtgaaagattcaccaaagtagagaaatttttttttatatagcaacagtggtgttatacctgtcaaaattaatatttccttggttttatcttataaccaatccatgttcagttttttctacttgtttcgaaaatgtcttttaaagttggtttgtttaaatcaggatccaacaagatccaatattatatttggttattaagtctttaaaaatctagatctttctacattgagttgttgttgttgttgttgtttgtttgtttttttcatagagttgttgcaaaacagagtcagttgactcctatagaatagcccacattctggatatattggtttgcttccatttatgtcatttaacttgtttctctacgtttcctataaatgtaagtaagctctaaaagcttcaaagtttggaagttttgggcaagaatatgtcagagatggttctgtgtgcttcgttttgtgtcacatcaggaagctcacagtgcttggttgtcaaaattgatccatgggttcagctggcctgatccctgtattataaggttccctatgaacctttcactttcttttttttttttttttttttgagacagtattactctgttgtccaggcgagagtgcagtggcgtgatcttggctcactgcagcctccgcctcctgggttcaagcaattctcctgtctcagccacccgagtagctggtattacaggcgcgtgccaccacgcccgactaatttttgtatttttactagagacggtttcaccatgtggccaggctggtcttgaactcctgacctcaagtgctctgcctgccttggcctcccgaagtgctgggattacaggcacgtgccaccacacccagccaacctttcaccttttgatttcattcctaaatgatacctgaatctcttatttcataaaggattgtaaaatggtggtttttcttattcctttactcctttcacattagttggaattcttctgtactgtgcgactctttagttggactcttccactaatatcaagtagggctatttgatcatttgcataggcaagacaggataaatatgtaattcttttaattgtgaattttgagaataaggaattgatgctctagttacttctagtatttcatgtttgatgctatttcaaatgaaatgttttcttgattttatttttgagttgttcattggtagtatatagaaatacaattgaattttgtacattgatcttgcaaccttggtaaatgcttgagttttagtagtttcttttttttttttcttccagctttttagttcaggggtacatgtgtaggatgtgcaggtttgttacctaggtaaaggtgtcccatggtggtttactgcacagatcatcccatcacctagatattaagcccagcatccattagctattcatcctgatgttctccccctcctcctacaccccatttttttttttcttttctgtttatttttttagagacaaagtctcactctattgcccaggctagagtgcagtggcaccatcatagctcactgaagcctttgaactcctgggaacaagtgatcttcccacctcagcctccccagtagctgggactgaggcagaaatttaaaaataaatatgcattcattcactccaagaaaagtaacaggcaaggcaagggttaaaaagaaaagaacaagttttcctctgcctagcaagctcacttcaaggacagttataagataacgctgtttgagaagccaaggccaaaggaatggactccagacaccccctcttccagagcaaggttgaaggaaaaaaaaaggaaagacaaattcctttactgttactcctttccctggcttcttaagcataactgtgttttgcaaatgtctgtatttagccagttcttatttttctttcaatgcagctataaggtcaccagctatgcaaggccacaagttatgctatgctataaagtatgtgacctgtcatgattaactgcttttgttttacttttgtaagtccgcttacaaaaaccccactccgtctttgtttaatgctcagctttttggatgtgaatccactgagctggtgcgtacctaaaataaacaatcctcctgttctccgtatcagtctctccagtcctcagtttcctgcaataggactacaggctcacaccaccacatctagctaatttctattattttgtagaaatggagtctttgtgttgcctgggctcgtcctgaactcctggcctcaagtgstattcccaccttggcctcccaaaatgttgttgggattacaggcatgagccaccacacttggctgagttttagtagtttttaaaaaatagatttcttagtgttttctacataaaagatcatgtcatctgagagtaaagatagttttgcttctgcctttccaagctagatgcctttaatttcctttctttcttgcttttttttgagacatggtctccctctgttgctcaggttggagtgcagtggcatgatcatggttcactgcagccttgacctgggcttgggcagtccttccacatcagtctcccgaggctgggactacaggcacatgcccagctttttttttgagtctcgctgtgttgcccaggctggaatacagtggcgcaatctcagctcactgcaacctccacctcccaggttcaagtgwttctcctgsctcagcctcccaagtagctgggattacaggcatacaccaccacacccagctaatttttgtatttttggtagggacgggttttcaccatgttggccaggctagtcttgaactcctgacctcaagtgatctgcccgccttggcctcccaaagtgctgggattacaggcatgagccaccgtgcctggcccccagctagttttttcaaaaaattgttatagagacagggtcttgccatattgcccaggctggtttcacactcctgggatcaagcagtcttcctgtctcagccttccaatgtcgggatgacaggcatgagccactgcacctggccttaatttcctttttttttttttttttttggagactgagtctcccactgtcacccaggctggagtgcaatggcgtaatctgggctcactgcagcctctgcctcccgggttcaagagattctattgcctcagcctcctgagaagctgggattacacgcgtgagccaccatacccggataattttgtatttttagtagagacagtgtttcagcatgttggccaggctggtcttgaactcctgatctcaggtaatccacctgccttggcctcccaaagtgctgagattacaggcatgagccacagtgcccggcctactttctttttctggctagaaccttgagtacaatgttgaatagaagtggtgaggccgggcgcagtggctcacacctgcaatcccagcactttgggaggccgagtcaggcagatcacctgaggccaggagttctagaccagcctggccaacgtggtgaaaccccatctctactaaaaatacaaaattatccaggtgtggtagctcatgactgtaatcccagctattcaggtggctgaggcatgagaatcgcttaaacccaggaggtggaggttgcagtgagtcgagatcgcgccactgcactctagcctgggtgatagagcgagaatctgtctcaaaaaaaaaaaaaagtggtgagagtacgtatccttgtctttttcccagtcttaggggaaaagcatgtattctttcatgattaattttttttttttaagacaaagtcttactctgttgcccaggctggagtgcagtggtgtgatcttggctcactgcaacctctgcctcctgagttcaagcgattctcctgcctcagccttccgagtagtggggattataggcgctcgccaccatgcctggctaatttttgttttttttagtagagatggggtttcaccatgttggtcaggctggttccgaacttctgacctgaaatgatccacctgcctcagcctcccaaagtgctgggattacaggtgtgagccactgcacctggcctttcatgattaaatttgatgttagctgtagttttttcatagatgccctttatcagatgaaggaatttaccttctcttcctagtatgttgagaatttttattatgaatgggtattggatcttgtcaaacaccttcgtgtgtctgttgagatgatcttgtttttgtactgtatgctactaattttactgctagtagttggtttttggatgtaaaaccaactttgtgtttctagggtaaatcccatttggtcagggtgtatagtcctatttatgtggtgctagacttggttttgtcataatttgttaagaatttttacagctggctggatgtggtggctcatgcctgtaatctcagcactttgggaggccaaggcaggaggattgcttgggcctaggagttctggaccagcctgggcagcatagggagacctgtcctctacaaaaaataataaatcagtaagagagagggagggagggaaggaaggaaggatgagaggaagggagagatagagaaggagggcgggagagtggaaaggaaggaggaaaaggagtctggatgttcatgagcgatattggtctgtaatgttttcttgtgatatctttagcttttctatgagggtaattatactggcctccctggttcaagtgattctcatgccacagtttcttgagcagctggcactacaggcgtccaccaccaatgtcttgttaatgtttgcatattttttagtagagatggggttttgccttgttaggctggtcttgaactcttggcctccagtgattcacttgccttggcttcccaaagtactgggattataggtacgagccaccgtgcctggcctggttgttatttttggagcttctcatgctgtatttatgcttttgacatgacccatttgtcttgttatagcctctctgctttctaacacaacaacagttcccaggcttaccttggacttggaatcagctattcctccatggagtcctggttccttatagttggaaccacagtctgggtgccatgtgcccgttgctgttaggttgtcatcgttggcagggcgcagtggtttatgcctgtaatcttggcactttgggaggctgaggcgagcagatcactttagcccacgagttcgagacyagcctgggcaacacagtgaagccccgtttctacaaaaaaaaaaaaatacaaaaattagctgggtgtggtggcatacacctgtaatcccagctacttgaaaggctgaggcatgaggatctctcgaacccaggaggtggaggctgcagtgagccgagatgcaccactgcactccagcctgggaaacagagcgagactgcgtctcaaaaaaataaataaataaaaaggttgttactgtttctagaacttttcggtggaaagaactaaagacatatttttgaaaagaaaataattggttcatgttgataattccaatttaaattttcacattaaacaattttcaggggatttttttgtactttatttttttcttacatcgaaaatcttggttcataacattaatacaatattgtttcaaaatgataataccaatattatcaatttgtctacagaatgaagtttaagacttttggagctgtggttcttagaataatactatgtttaaataccctttaaatcattgttttaatatatcaccagcttgatatgtagatttgcttcagtttctttttcaaaaagccttgattataggtgtgtctctttaccatgttccctccctccttctcttataggtataaacactttttatttcctatttggtttacttttccagtggttctttttgcatatacaagcaaatgcaggttatttaagttgagatatagttcacataccataagattcatctcaaaaaagtgtgcagtccggccgggcatggtgactcatgcctgtaatcccagcattttgggaggccgaggtgggtggatcacctgaggtcaggagttcaaaaccagcctggccaacatggtgaaaccccatctctactaaaaatacaaaaattagctgggtgtggtggcatgtgcctgtaatcccaactactcaggaggctgaggtgcaagaatcacttgaacctgggagggggaggttgcagtgaacygagatcatgccactgcactccagcctgggtgacagagtgagactccatctaaaatataaaaagaagaaaagggtgcaactaagtgatttttagtagtaatataattatcccttgttatctgtggtgtataggttccaggaccccacagataccaaaatccacaaatactcaagtctcttacataaaatggcatggtatttgcatataacctacacatatcctcccatatgctttaaatcatctctagattactgatagtacctaatacaacgtaaatgctatgtgaatagttatgctatattggttatttgtattttttattgctatattgttattttttatttatttatttttttagatggagtctcgctctgttgcccaggctggagtgcagtggtccacgatcttggctcaatgaaacttccacctcctgggttcaagtgatgctcctgcctcagcctcccaagtagctgagattacaggcatgtgcctggctaatttttatatttttagtagagacagggtttcaccatgttggccaggtcttggaactcctgacctcaagtgatctacctgccttggcctcccaaagtactaggattacaggcatgagccactgcgcctggcctgttattttttatttttattttttctgaatattttttatctgcttggttgaatcaatggatgtggatggccaactatatattcatagttttacagttttctctactgtccgactccacaacatttcatcatcccaaaaaggatccccatatccaggagatgattaaaaaaagaaaaagaaktcccattattagtatcattgaccatgtctctctttctccagcccctggcaaccattaatctgctttctgtgtctggatttgcctgttctggacatttcatatggccttttttttttttttttttttttttttttcccctaaacggagtcttgctgtctcccaggctggagtgcagtggcgtgatgtcggctcactgcaagctctgcctcctcggttcacgccattcttctgcctcagcgtaccgagtagctgggactacaggcgcccgccaccacgcccggctacctttttgtatttttagtagagatggggtttcaccgtgttagccaggatggtcttgatctcctgacctcgtgatcctcccgcctcagcctcccaaagtgcctggattacaggagtaagccaccgtgcccggccttttttttttttttttttttttttttttttgacagagtctcactctggctcaggctagagtgcagkggcatgatcttggctcactgcaacttccacctcctgggttcaagcaattctcctgcctcaacctcccaagcagctgggattatatgcgcccgccaccacgcctagctaatttttgtagagatgcggtttcactatgttggccgggctggtcttgatctcctgacctcaagtaatctgcccgcctcggcctcccaaagtgctgggattacatgtgtgaaccactgcacctggctaaaataaatttattttarattcagggggtacatgtgcaggtttgttacaagggtatattccaagatgctgaagtttgggctactaatgaccctgttgaccaagcagtgaacatagtacctgataggtagtttttcagcccttgccccgtagccgcttttggaatccccagtgtttattgttcccatctttgtgtccataagtacccagtgtttagctcccgcttataagtgagaacatggtgtttgattttctgtttctgtgttaatttgcttaagataatggcctccagctgcatccatgttgctgcagaggacatgattttgttcttttttatggctgcatagtatttcatggtgtgtatgtgccacattttctgtatcgtatttaccattgatgggcacctgggttgattccatgtctttgctgttgtgaatagtgctgcattgaacatgtgagggcaagtgtctttttggtagagcagtttattttcctttgggtagatagccagtaatgggattgctggttcaaatggtgattcagtttttagttctaagctttgtaatattccaccctgtttctattgtataggtttttttttttttttttttttttttgctatgcaggactactgcagtatctatagctttttagtcagtctctgtgatgaatatttacgttgtttccagtatttagccatttaaaataatgttgccgtgatgaataaccttgtgcacagagtatttcacattttgctgctgtaattttgggacatattcctagaagtgggattcctaggtcaaagggcaagtgcatctacaattttkctagatctggtcagattcccccaaagaggtttttgtattttgcattcccagcaaaatacaatcagcaatgatgattgctgtaccatgtgtttgtcaattgtgaatttgttcctagcatttagaaattgggagattctacttaaaaatccttatttccagtgtcttaaaaaaaaatcagagaatctgccttaatctacccatggcaacagttggctagagctgaataacagctgccccttttctaggtactctctaggttactgcagcccccacttggccattttacttacttttgctacctatcagtctcctatagacatgagtttttgacccctgctctaagtatggttttctgggtaggtagaatggagacggagagtttgggacttgaagacatagaggacaatttagattattatgttgtaagagccaccagtgtgaatgttgatgaccctaaagagggtggcagggaatatgacaaggggatattaggaacacaggattgaaatccttgaggaaagcacatgtcctagaggtccatggaagactawctgaaaaagaaggcatattttttgtggttgccatggtcctataccaaagaggttttgtgaaggcagcattacagwaggtctggaaaggaccagcagctgggagcagggagtgtgctaaagccctcctggtgtactcttcctgccttcccccatatactgaagtttgagaggctgggaaggtgcggaatgggaaaaggagcagctgcttatgttcagtttaacattctctgggtttctccatctaggtcttgagttcattctcttcctgtccttttggcttccttgtttaacctggtccctgtttcaggagagaagcctcatcagtgccaagtctgtgggaagaccttctctcagagtggaagcaggaatgtgcatatgagaaagcatcacctgcagctgggagcagctgggagtcaagagcaggagcaaactggtgaggagggtgggcatagyggaacgctgtactacttctagggttccaagagccaaatcactgtcctgcctgcttatctggaaattttctgattctgttttgggtagatagacctggtctcatttgatgggctgatggtttccaaacatagctatacagtagaatcatctgcaaccttttaaaatttatatactttttgttgcttgtccgcccaccaataaaacaaagcaatctgataaatgagataatttgcaagatcctagaatctgtagttttaaaagtttccctagtgagtttgatggtaactagtgctgatccatgaacaagcatttgagtaacacagtgataaaagatttccrcatgggaagagtttaagctttttaatttttttagatggagtcttgctttgtcacccaggctggagtgcagtggcgccatctcgactcactgcaacctctgcctcctgggttcaagcagttttcctgcctcagcctcttgagtagctgggattataggcaggtgccaccacacctggctgatttttatatttttgtagagacggggtttcaccatgttggccaggctggaagcatattttatttaccagtcatgactacctttttgccctgcctgaaatttgataactctttttaattcttattccttcgccatatctttccttaattattccaaatattcctttctaaagatccacctatcctgtttcatatgctaattcttcagacgctgaacacaagcaaggatcattatcttctaaggcttactctttcccttctaggtttattcttgtttctcgaaagtaggtgaaatagggggtggcatcccatctataggttaacttctagtaatgaaagagaaggccagcttctgttgaaagaaaatgaggaccaggcacagccttgattgctgtatgtctctcacaacctattctctgtgcagctgagccactaatgggcagtagtttgcttgaagaggcttcagtacccagtaaaaacctggtgtctatgaattcccagcccagccttggtggagagtccttgaacctaccaaataccaattctatcctgggagttgatgayggtaagacttccaactctcctttatttgggaaaaatgggctgcaactaggggctaaggaatggggtgtctccacaatgtatgtttaaatctcatttcttatgagtagctgtggtatgagtagcatttgtgttcttattctctggggtggattagtcaatctgtttaaaaaaaawttttttttcattgaagataatataataaaagaataaaaagaaaaaattcttragaaaaaattattcctaatcctagcatcctagcccaactatttctatctttcctattgcagttatggaagaacttaacttttaraacatttaaacagaacataaccaggttttacagaggagatataaagcaatttctccataccttcaaaagccatatcttctggagaaaagaaagggctctctaggaaacacttgctcctctctggtatagaaatttcacccaagttacacaggccaggccctcttctctgaaaaacttaacaggtgaggtcagcatgcatttattcagtgcctactgtgtgcctggcaccatgggaaagacaaaagtagaagatagggaccttaaaatccagttgagaagtgaaagcttacatatatatgggaaagaacattgagtacataaaagatagtatataagccaacattaaattatatggtacagcataaaatagttgtataatctagaaaacccctagaagaaacttctagttttttgagggctaagtggtatatccataaactatttccagaagattttcatggtgatcccactgatgaacatttagtaactgtgagaccctatgtttttgttactcatatcatattcagttagtaagtgctattagtatcattggcgactgcttttaagggtggctttggttcccttacctgcttgcctaagacttttgcctgtttcatacatagttttaattcagttaaaagtgctaacrccatattattctaaatcctgtattaagatttcttgcctttctattctctttttatattactttccaaattcactgataatgcttatcagacaggattaacttggaagaaatagargaatgtgggaaatagaggaatagagttttagagttgttaatgagaggcttaatgatccagataggtgtatctctggattcacttttcattgaaacatttttctgttgcttcacagaggtgcttgctgaaggatccccacgttccctgtcttcagtgcctgatgtgacacatcacctggtgaccatgcagtcagggaggcaatcatatgaagtttctgtcttaactgcagtaaatccacaagaggtaaagtggtctcttgccctttgtttctgtgacaattcatgtggggaatgattgagaatttagaggacctgaaaaagtctccagtttccatttcctggaaactttggcacgaatattttcctttaaattaagcatgagttcagcttgaaaggagcctgagggttagggtcttaatgaattggagattggtctgtcacagctgggactcccggctttaaagttcttttatatacattccttgttgatgtctgttcccactattctctgccacactataacatgatacagcttttattttataaaagcacacagcaggcactgaataaatgcatgttgacctcacctgttaagttattcagagaagagggcctggcctgtgtaaattgggtgaaatttctgtaccagacaggagcaagtatttcctagagatccctttcttttctccagaaataacatcctggaaaaagtccctcagcaaaaaaggtagtaacaaaatcattaaacataattattgttcattctgctatggtcatatgtctgggagataccaggcttaaccaaatgggcatatacagatttgttcacttgcttgctaagtgagaaccattacctaaatcaatggtctccagcctttttggcaccagggaccggtttcgtttcacctcaggtcatcaggcattagattctgataaggagtgcgcaacctagatccctcaaatacacagttcacaatagggtttgcgctcctatgagaatctgttgctgctgctgatctgacaggagaggtggagctcaggtggtaatgcttgctcacctgctgctcacctcctgctgtgtggcctggttcctaacagggcacggaccagtgctggtccatggcctgggggttggtgacttctgatctaaacaaaaagggtttgaggttgagctaaagcactttcaactctgtagtttggctttgactcaggaaacagaatgcaaagtggtcagtgttttaaaatcttgggatatttcactggtcttgtgtcatgggagtggatgacttcatcacgagcacatttcatatgcataaacttttgtcaaaacctctgtagcttggatcctttcagtattacattagtttttatggtgctcttccgtcttttctcctcttttcttttctttttttttttgagacagagtctcgctccgttgcccaggctggagtgcagtggtgcgttctcggctcactgcaacctctgcctcccaggttcaagcgattctcctgcctcagcctcctgagtagctgctactacaggtgcgtgccaccacgcccagctaatttttttgtatttttagtagagacagggtttcaccatgttggccaggatggtctcgatctcttgacctcgtgatctgcccacctcagcctcccaaagtgctggaattacaggcgtgagccactgcacccagccttcttcttttcattataacctttataccacagtaagctgttgcatcattcaaatgactctgcatcctatattgaatattctccattattctctaatatctttgggggtacccaggattacagggttctgggcatacatgttaatgcttttgccaggacttttcttttthttgttgtgacccattgtctttgcttatatttaaagtttttgatcttgatatcattggttctttcctaagtcactttttctggtaactgctttggaatgaatcatacatatctcacttacggagccttcctctttctcctccatttttcttgtcttcatttttctattttaaagcttttattatggaaattttcagagtacagtgagagagagactagtatgataaacccacgtcgaagtcgaagttacggctgagagcggcagctcacacctgtctcctaactttgacttttttttttttttgagatggagtcccactgtcgcccaggctggagtgcagtggtgcgatctcagctcactgcaacctccgcctctcaggttcaagcaattttcctgcctcagtctcctgaatagctgggattgcaggcacccactaccaaacccggctaatttttgtatttttattagagatagggttttaccctgttggccaggctagtctggaactcctgacctcaagtgatccacccgcctcagcctcccaaagtgctgggattacaggtgtgagctgccgcacttggccctaactttgacagttaactttatgccatgctcagtggcccatgcctataatcccagcactttcggaggtggaggcaagtggattgcttgaatccaggagttcaagaccagcctgggcaacataagacccctatctctacaaaaaatacaaaaaaaaattagcgggacgtggtggcatgtgcctgtggtcccaactactcgggaggctgaagtaggaggatcacctaagcctgggaggttgaggctacagtgagcagtgactgtgccactgtactccagcctgggtgacagagtgagaccctgtctcaaaagacaaaaacacaattaactttatactgttcttgttttatctctttcctccttttgttgttgttgctgtttatgatggagtatttcaaagcaaattgtaggcatgtcatttcttctgtatatatttcagtatatgcctctaacaagatacaatattaaaaactataatatctttaccacttcaaacaaagataacaataatttattgtatyctctaatagtctatgttctttttttcctccccctcaaaaatatcttatggttggtttgctagagtcaggattcaaacaatgtctgtatattgcatttgtttaatayttctcttaattctctttataatagtccttttttttcagtatggttatctatttaaggaactgggttttttgttttgttttgtttttgtttttgttttgagactgagtctyactctgtggcccaggtcaagagtgcagtggcgtgatctcggctcactgcaacctctgcctcccaggttcaagcaattctcctgcytcaagtctcccaattagctgggattacaggcacctgccaccaagccccactaatttttgtatttttagtagagacgggcttttaccatgttggccaggctggtcccaaactcctgacctcaagtgatccacccacctcggcctcccaaagtgctgggattacaggcgtgagccactgcgcccggccaggaattggagtttttgtcctaaagattttcccacattctggttttggctgattgactccttttgttaatattaatttctctatccactgtatttcctaaaaactggtagttacatttagaggtttgattagattcaatttttcccccttggcaagaatatttcataaatggtgctcttgcttcctattacatctcatcaggaggcacatgacaatcagttgatcttaagattgactggtaggttatgtaaaggttttggcaaccattactgatcatagcctagatctatttttcattaaggcctgcaaaatggtgatatcctaattctcttgttccctctgtgtttattatgattttttttttttttgaggtggagtcttgctatgttgcccaggctggagtgcagtggcaccatctcggctcactgcaacctctacctcccgaattcaagcggttcttctgcctcagcctcctgagtagctgggaccacaggcaggtgccaccacgcccggctgtatttttagtagagacggggtttcaccatgttggctaggctggtcttgaactcctgacctcaggtgatccacccgcctcagcctcccaaactgctgggattacaggcatgagccactgcgcccggcctaattgtgattcttttatacaagaaatacttctctcatcaaccatagggttgccctgaaatcgtcatttcaggaaaaccatctcgtttttcttttacctagtacacattattattcgagcaagccaacccacagcacctagccttttcttttttatatttgaaacctcagagcttttctctcctgtattggtaaatatctttaaaattctccacgttacccaaataaatgccagatgtatgaaaatttaattcattcagcggctagttaccacatacctagtatgtgtggggcattctgcagggtactagttatacaatagtaaacaaaatatagtctctgcctcaaatagcttataggcagaattaggaccttcataactatatatatggtgctggagttgcactgtacagtgaggttaggatgggagaagtgaccaattaatcaaccggcaatttttttttttttttttaattttttagacggagtctcactctgttgcccaggctggagtgcagtggcacaatctcggcccactgcaacctctacctcctgggttcaagcaattctcatgtctcagactcctgagtagctgggattacaggcggccaccaccacacccagctaattttttgtatttttgatagagacggggtttcatcatgttggccaggctggtctcaaactcctgaccttaggtgatccacccgcctcggcctcccaaagtgctgggattacaggcatgagccactgcgcccagcctaaactggcagtttttaagtgtagtacgttccagtcttgggagaagtcagagaatatgttttagagtttaagttgagatgggagggatgaatagacatcatcttgatggagaagtaggagttggaagaatataacaggcagaaggacagcagtgtgtacaaaggtagaaggtaagggagtagagggcctctgtggaactgtaaatagggttgagtgtgatgggacatgggatgaagagatgggctggagaggaaaattgagagctggaaagataagctagtctcttsaaaggtcttacaaggcatgattttatcctgggggcactgaagaaccactgcatggtttgaagtagggtatgacgtgatcagatttgtgtattcagaatatccagtaatagtacatttgttccctagaacctaggcacaagtcttggaattggcctcagagcatccatgtataataggtgctgcccacttacagcctcagggagacagcataacacaggctgcctaaaaaacgaaagacctgggtgtggtggatcatgtctataatcccagcacttttggaagctaaggtgggaggatcacttgaggccagaagttcgagacaagcctggacaacagagcaagatcctgtctctacaaaaagttttttaaaaaattatccaggcatagtggtgcatacctgtagtcccagctactccagaggctgaggcaggaggatcaacttgagcccaggagttcgaggctgcagtgaactatgattgtcccactgcactccagcctgggagagatcctatcccaaaaatcaaacaaaaaaaggaagtatggtcttcactccaggaaggcacaaaacccagtttcataatggaagcccaaaacacttagaaaaatattaacaacacaaaagggaaagtgctgtcctggatgtagctcaaaatcctgcactgtcactttttcctcatgggtttttgtatatttacaaacataccctctgtctgagcctcacttcttttgtgttttcttcacttttagcattattctcctcctcgtatcacaggcatttccactgcttatcccctccttttctttcttcactagtttgggtcctccaataccttcagttttttttcaagctgtgaggccctcagggttccaggcttaggcctcttcctcatccaaggtctaggtaataacttgctatttctccagtgagtgaggaatgttgattccttaagaactttcaggtgccagagaaggtgaaggctatttgcaacacatgtccgtttcaccttttttggagatcaccaagcagtatggatcaaagtctactgatgaacttgtacttcctgtaaatatgctctaaaaataaaaatagcttatcaagaatatcagagaacaaccaaatctgttatcagaaattttcatgagaggctgggtgcggtggctagcactttgggaggctggggtgggaggatcaattgagcttaggagtttgagaccagcctgggcaacacaggaaaaccccatgtctacaaaaaataaaataaaattagctggtcctagctacttgggaggctgaggtgagagsatcacttgggcccaggaagttgaggctgtagtgagccatgatcttgccactacactccagtctgggtgacagagccaaactctttaaaaaaaaaaaagaagaaaaattaccatgggaaaaatatcagaaactacaagtcacctctctggttcaggtggacaatctctattttccctcattattgtgccacatctgagaattagatggaggactcattgcacaggcccaactgggaaccccagggcttttgggctgtcatacttactaaaggtcattctaaatggggctccatatttacattgagttcacattcttgaactcaagaaccagtataagagattcccagctagttttgactacctcttagaatgctttccaaatcaaggcamaaatagaaattacaaattctataatatttctcataaagtacctttgctaagtttgactgcaaagatctggatcttggcctccattaaaaacacactattcttaactttcctgccacacagcatcaaatggaatatgtggtttctttaaggtttaattttttctttagattttgtttaaaagtctttaaattccatataattaaactcttaaaaaaaagtttttttggtggatacagtgtcttaccatgttgcccaggctgatctcaaatttctggcctcaagcaatcctcctccctcagcctcccaaagtggtggggttataggcatgagccatggtgcccagcccaatcattaaattctactgtataaattaccttcatccaaattaggatcaccaagtaaatacatctcaagctgaagaatttatttgattagattttaataagttgtttttgttctgaattttactgaattgttcccatctcatttttgtgtgtctgaaaacagtctcagtctgtcactcaggctggagtgcagtgcagtggcatgatcatagctcactgcacccttgaactcctgggctcaagtgatcctcctccctcagcctcccaagtagctaggactgcaagcatgtaccaccatgcttaatttttaaaattttcttgtagagacagggcctcactgtgttgcccaagtgggtctcaaatttctggtctcaagcagttctcctgcctcagcctcccaaagtgctgggattacagatgtgagccactgcacccagcctcattttgtttttatattaaaatggaagccaatttcattatttcaaaactcctttgaatagagccttgtgtatagagtagaatgttagtggtagttgccattatgcaggagtcccttaggcttatcattcttttaagcccaaggaacccctagatcttttatgagtgggtttcagctctcatatagtacttataaaggaacagctcctcttcctatttccttctcctacttgagccttcagcctatcctttggctgacacgtataagattttggttccaccatttctgttttccctgtaagttagagattcctctgtcactgactgatgagtaggtaactacacaaacaatagtttggcttatagactcagaatatttgattgccagagttaaaatgccagccttatgacatggctaaagtgctgtcccaaggccacagtgacatctatcagtccgtgcatstgtttgctttggaagtagatagccttcattcacccctgtagtgcattctccatcctccactcttaatactttttactatgaattattttttctataattcaactgtaacctattctagatttgctttcaatcttttacagttactaaaccaaggagatttaactgaaagacggacatgagcgtgggtgctgactcctggaagagcaactctatctgatctcaaaatgcgtatactgggaacaggatgccttagcccacaacagaaccagaatgaatctttgaaggcacaagactctgcttttgccactcttcctctttcctggtatagaagatggatgtaggagagcttcttttctaactaccatctgatcagacaaggaatgaagcaatgactgtgggctgggaaactgtacctacctctcttcccactgcaaatttctgggatagaccaaaagtgaatttgattatgtgttggctgaagttcttcattctgactgttgaggggaggttttcctttgaagagttttcatcccagactcagctgtcttttcacatggatgaaataattcctgctaccaacaacagagcttcaccaggaagttgagttttcaagatgccttgttgctttgaagaagggagtgatgtcaattctcttgttacattctccctttagcaacctgagtaagagactctctgccactgggctgcaaaaaaataaattacttgaatctccccttggcccaggctgaggtactatcttgtcctatacacttctacttggtcactttgctttyttcgttaatggaacatacagtagcatgttaagagggatttcatgtttttgtttttttaaagttaaaaattacatgatgcagagattcaggttttcctttaaataaacaaaacagcccagtcagttctttggctcttgttttatacaaaatttgttttcttagagattaagaatttaatctttccctttaaaatagtgtattgatttacccttaggattccataccagtaaaactgaaccgaggagtcttaggaaacaacaagaacatcttcatttcttaagcccaggtgatagttactctgtcaccaccaaaaaagacgcatctgagaaaatggcaataaaaacagatacttytgaatttttccacaaagatagtttttttaaaaaagcttgagaaaggtgctttagttagagcaggcactcttgctatcartcatcctgtctccacagctactgagaaaatatccactcatcatcattatgatttgagatggggtcttgctctgtcacccaggctggagtgcagtagtgtaatcatagctcaatgtaaccttgaactcctasgctcaaggcatcctcccacctcagcctcctgaatagctaggactataggcatgtaccaccagtccagctaactttttgtggtttttttggtagaaatgaggtctgtgttgcccaggctggtcttgaacgcctggcttcaagcgatcctcctgccttggcccctcaaagtgctgggattacaagcatgaaccactgcaccgagccagaatatccaattattattggtgagaagaaaattattccaaagttcacctactagtagaaaatcttggttgtctgggaaattttaagtttacttaaaatgaacctcatgctcacataaacacacaggcacattctaaacagataacgggagagaattgttttaaattcttaatttgttaatgacatgcataatcacatagtacatagactgtgttcatggcaattacttgtattcttagaatgccagtttttgcttcatgcagccatttatattagagcagtggttctcagccaggcacatttttgccccctggggatatgcaatatctggagacatttttggttgtcacagctggggagaggggtactactggcatctagcaggtagtggccagggatgctactaaacattctacaatgtacaggacagttcccttccccaaccctcaacaaagaattaggtggcccaaaatattaatagcactgaggataagaaatcctgtactagaagttgtaagtttttcatcccccatgggctagatctgatatgcagatgtattttattttgcccatacaatatttctaagtaatttttaaattagttgatagcatacaaatttctggcttgatgaaaatgtagttgatgtagtaactctgagcctatattccagcaggatttgatactttccagtgtctactatctcctactgtctacacccactccatggacgcatttatgtttctgcactagccccttataggcatttgggcctgtgctctcttttctgtacctaattctctaagtgtgaggcacaaagcaggaacccttaactttaggctaccatccctccacctgagcctccccactttgatttccttgaactattctctgttatctgctgctctttttttttctcagacagagttttgctctgctgcccaggctggagtgctgtggagtgatctcagctcattacaacctctgcctcttgggttcaagtgattctcctgcctcagcttcccaagtagctaggattacaggcacgtgtcatcacgcccagctaatttttgtatttttagtagaggtggagttttgccgtgttggctggactggtctcaaactcctgacctcagatgatctgcctgcctcagcctcccaaagtgttgggattacaggcgtgagccactgcgcctggcctgttaatctgctactcttcatttgtccatcctctaacagtagccatgactcaaaacccaagttttccctgccttgactcaaacccaagttagctgcttaatatttttcaaaagcagtaattttaagtgtagtgattaagcaagtgatacgagattttctggtgactgatgagacagctcctccagtactttcctggggcttgcaggctgttctagagatccttctaaaccctgctctggatctctgatgctgagttttgtagtttcttggaacctgcagaataaattaaaacatgaaaaacaaaaaaaatttttttttcagacagggtctcactctcacccaggctggagtgcagtggcatgatctcagctcactgcagcctggacagcccagctgaagcaaccctcccacctcaagcaatcctcccaccttagcttcccaagtagctgggattataggcacgtgccactgcacccagctaattttttttttttttttaactttttgtagagacagggttttgccatgttgcccaggctggtctcaaactcctgggctcaagcgatccacccacgtcagcctctcaaagtgctgggattacaggcgtgagccaccgtgcccagtctgaaaaaagaaagtcttaaagcactgtgtaaggtttaagaacggtctctcccagcactttgggaggccatggcaggtgaatcacgaggtcaagagatcaagaccatcctggccaacatggtgaaaccccatctctactaaaaatacaaaaaatagctgggcgtggtagtggacacctgtagtcccacctactcaggaggctgaagcaggagaatcgcttgaacccgggaagcggagactgcagtgagcagagactgcagtgagccaagactgcgccactgcactccaacctggcgacggagcaagactccgtctcaaaaaaaaaagtctcaacattattactattttatatgggatgtaaaggaaaatttctaggggtataaaactgagataggaattagggtaggggctgctaggatttaagatacaaaacaattgagaataatggagagaagatactattttctccctttgactcaatatcaaaatgggttatggagggccgggcgcggtcactcacgcctgtaatcccagcactttgggaggctgaggagggtagatcacgaggtgaggagatcgagaccatcctggctaacatggtgaaaccccgtctctactaaaaatacacaaaaattagccaggcgtgatggcgggagcctgtaatcccagctactcgggaggctgaggcaggagaatggcgtgaacccaggaggcggagcttgcagtgagccagaaatcgcgccactgcactccagcctgggcaacagagcgagactctgtctcaaaaaaaaaatacaaaaaataaaaaaaaaaaaggttatggagaaggtgatactaatgagctacctttaaggaatgctagaaaaacagttttatagttttataagaagtcaaaatatacatgatttttcttcaaaaataaagtagaaatagtttcagctcatgaaattggaactggaattggaaaatgatctgtttcaaaatggaagaaaacgaaacataatttgtcagattttattcacaactgcaccactctctaaattcaaatgtgttacttggagatctctggattacttattaatgttacataaatacaggattatgatctcaaaataccagtggctattctaaagtttcctcccagtggtattactgggtatgacaatttagagagctgcagaatgacagcaacatttcaggttacctgggaaaatccttgattttggtctctttctcttgaacagcccgggtgccttgacccttgtttctcacaaagtcttcctccagcccagcctgcttcagggtgtctagataccactgttctgcttctttcttggctagatcctgtgggatggaaattaatctgttgtagctgtcttatgaattaccagacaattctaaattacttaatcagtattgttacaatactgccacaaccaccaccacccttattgtggggcatagatttgcaagaaaattatttaacccttgttttccagccttaatgtgtatataaatcacctgaggtcttgttaaaatgcagatttcacatttggtaggtgtcagatgaggactgtaattctgtatttctaacactccccagagatgccaaactgttgatttgggagtcacaattttgaaaagcaatgacttagacttttgggagacaaatgagacccagatttaaaaggatggactaaaaacctaagattttaaagcaacaaaccattatcaggaacactaaaataaaatagaaaataagctacaccaagactcttagtggaaggacagatggtctgcatgtggaccagcagaatattattttttgtttaagtattcaagaacaaaatcatagagtactttgtatttttcctagagaggtgaaagatctgttgagatctgaagagtgagcttgcttaacattaacataaagaagcatgagattttgaacaatgcaggttgctaagtaaatccaagaccatgtgtgcttatgtgtgtgagaggagaaagatttatggagggaggaggaagtggagccagcaaatgcctagacaatgtactaactataagatggagctaatgccctgccattggaactaggtcactatggaaccccaacttgtctgaaactggagaggaaagagatccacagagcctaatgcagtagaaacagagcatccttacatccttacggagatctcagctgagtccaacatccctaaaagtctacagagaatatcttaaaatgatactcttccaggatacttcgggtacactgcctatgggttagccctgctccataaggaacacacactcacacacacacacacatgcatacaaaataaaagaagaaaaaaaaatttcaggcttccagcctgaaagccacttagtctagagaaagccttgcagggtgtttgtgggcatcctaatgcttggagacctataaatataccacagctctagaggctggggaggcccagggccagcagcactgccagaggagagatacctttccagcactgtgaacagtggctccagagcatagaaagagccaaatggtccctgtgtctctggggtctaatgcccagtctgatgaaatctgaatggtagactacagtgaaagctctaggaagtgaaatatccctttatcgatgcctttggagtccactcttggatgaaatcaacacaagcagcattctctattgtactatttattttgggaaaagaaggtagtagtgaaattagaatttctgggcctcaaggaaaattttaatacccacatattaaaattgttttgtaatttttcagagtccttttatctaaggcagaaagaaaacaaatgatggtttagttttaccttggcaacttgttcaaagagatagggccttgtttgtattcgctgcttcatttcctccagttctttcttatattctttcgctcttttacggtcattgttcctggaattagcaagacttttagaaagaatttcatcttttctaatccagaatacccttcatttccagtaaagcagtgtaactctcgtgtacactgtaaattcctatctgacttggaaaatcatgaccctgctgtgattacaggagcctacctacctcgataactctattttgcattttctggcaataggccagtggtctgttggatcccaaggcaagcaccccttttgacacatagaggacactgaccggttctctttcagctttgctttgaacacttcctccaggcttttatggggatccatggcttttgcacgcaaggtcacagatttggacattgcttgagacttctttttgtgtatctccagccactgaatactctcatctgctttgttctttttttcaagtgcacttctaaaggaaggaggcagaaaaagagtatagattaccaacctgggtatactgaaaagcaatcttaggccaggtgtggtggctcacacttgtagtcctagcactttgggaggccaaggcaggtggatcacctgaggtcaggagtccaagaccagcctggccaatacggtgaaaccccagctctactaaaaatacaaaaattagctgggcatggtggtgtgcacctgtaatcccaactactcgggaggctgaggcaagagaatcgcttgaacccgggaggcagaggttgcaataagccaagatcgcactgctgcactccagcctgggcgacagatcaaattccgtctcaaaaataataataataataaaataaaataaaatagccgggcatggtggctcatgcctgtaatcccagcactttgggaggccgaggcgggcggatcacaaggtcaggagatcgagactatcctggctaacactgtgaaaccccatctctactaaaaatacaaaaaattagccgggtgcggtggtgggcgcctgtagtcccagctactcgggaggctgaggcaggagaatggcatgaacctgggaggcggagcttgcagtgagccgagatcgtgccactgcactccagcctgggcgacagtgagagactccgtctcaaaaaataataaaaaataaataaataaaataaagcaatcttagtaaccttttctggaaagtaagttggtgtttttaatgaatggggcatgtaatttacctcaactgccatttttaaaaataataaaattctaggattaaatgcactggcagatgaagcctttccagcactagggacacagtgagttcctaccctagaagtg

SEQ ID NO: 97681 - DNA, 67362 bp, Homo sapiens
  misc_feature (1)...(67362): n = A,T,C or G
gccactgcacccagctgtagttaacttttttttttggggggacggagtctcgcttcgtcacccaggctggaatgcagtagcgcaatctcagctcactgcaagctccacctcccaggttcatgccattctcctgcatcagccacctgagtcgctgggactacaggcgcccaccaccacgcccggctaattttttgtatttttagtagagacggggtttcactgtgttagccaggatggtctcgatctcctgacctcgtgatccacccacctcggcctcccaaagtgctgggattacaggcgtgagccacgtcacctggcctaggtgtagttaactttttaagcgaataatattgccattatgattacttatgtcatgcctgccatgtgctcggcattgtgctgagtgctggataaagtgaagctctaggaaaggaaaccctggactgggaacatggcatacactttatgccatgatagctttatttccaaatcctgctgccattggtggcaagtcactctaaaggtgttctcccctattcttttccttcatagcaagcacaactttgtggcaatttttctttttttgagataagagtctcactctgtcatccaggctggagtgcagtggctccataatagctcactgcagcctcgaatgcctcagtctcaggagtagctggggttacaggtgtgaatcacacccagcctgtaattttctttctttgtgcaagcacttgcttcatgtctctctctcactagattataaaaaccatgagtgcaggaaagggtctgttccactcattactggcaggcaggcagattctggtagtctttttgctggtgtgatagaagaaacaggacactgtctctgtccttcttctggagctgcagcagtcaccttacaatcacgagttgcacaagagggtggcaaaagccacgttgcaaagggtgcaagagaaagatggaacatacctgtatgtttcatgactttgttgagcactgagctaaggctcaccaccttcagacctcttatccgatgagaaaataaacttgtatttagccacttttgctagggttttctatttttggcaatggaatacattcctaaacggtattagcaataagaccaaaatgatattctcacgagacttttgtctagtgaggaaagatgcacatgtaaacaaatccatgcatttgtaaaatacttgctttgtggagctctggacagggtgaggtaatggactgcacctggcttaagcaattaggtcatggctcttccactaactgagataggaaacctaggaggtacagcttatttgtggggcaagagtagctctttgttgggtaggtcagctttaagtaactgtaggacaactagggggagggatccagagacagcaggatacatggatctgagctccagggagaagatgtctgggatatacaatgggtgtcatcagtgtgcacatgagtgcagcctaagagtgaaagtgtattgagctcttgtttcaggctctgtgctaagtgctttgtaccatcatcatcatttactgagctgacatttactgagcacttactacgtgccaattagacttctaactggtttacttcattatcccattacttcatttatctcattcaattctcacaacccagaaagggaagtactatcccagttttagttatgagaaaacttgagaactagagaaattaagtaacttgctagtgagttgtagagccagaaacacctgcacgtgggcagctgtcaaaaaaacaaaaacagaaacagaaacaaaaacccacctgggcaacatggcaaaactccgtctctacaaaaaaatacaaaaattagccgggcttggtggcatatgcctgtagtcccagctacttgagaggctgaggtgagagaatcgcttgagcccagggggttgaggttgcggtgagctgtgattgcaccacttcactccagcctgggtgacagagggagaccctaactcaaagaaaaaataaaacaaaagcacctaagaagactgtgtagaatgagagaagagggcaaaggacctaaagctatgaggacattaacatgtttttccttttttttttaactaaaaaattttaaatttacttttaaaaactaaggtatatgtatatcaaaacttatgcacaactttcaagcatacagatcagttaattttcacagccgggcatgttcatgcttggaaattccagcactttgggaggccaaggcaggagggttgtttgagctcagaagttcaagaccagctgagacaacatagggagaccccacttctatttttttttttgagacagagttttgctcttgtcacccaggctggagtgcagtggcgtgatctcggctgaccgcaacctctgcctcctgggttcaagcgattctcctgcctaaggctcctgagtagctgggctaacacgtgcgcaccactgtgcccagagaatcgtgtctacatgctcgcacacattgtagttatctcatctacagagggagcgttgaccctagtagaaccactctgaacttcataacccctgacctggacgaaagcaccttgtctgcacacactcgcactcgactcccgattgcagtgcacggagcacactcctgcccaagaagaaaatgttcgtatctacctaatgcaagcataggtactctaatcctacgcgatgtctcacatatgacgaacacgttacatttgtagcttcatacggtatacgataagcatacgcagcccattagttaagcatagtatatgacagtgtccaccattgaggggtacgagaattgtcgccagcaaactgacattagcttttgaattggcctccagccatgcccctaacactctggcgtccgaatgtctcgaaaaccaagctctatcccttccagggttgtaaacccgccctgtggttgccataaaaacacaaaaagctatatccgaactttcgatcgccgacgttaattttttaatactcagctttaatattaatggcttttatgcccaggaaataccccctttcatcgttgggtgggcatgcgagctcgtaatggggacacttcacacactcttgattgcgctctacaaagcgttgagccacaccagatgccaataactcccacctccacctgaggccatcaactaaattctccctcacacnnnnnnnnnnnnnnnnnnnnnnnnnnnnnnnnnnnnnnnnnnnnnnnnnnnnnnnnnncaataaataaaagtaagttttacaatgtgaacacactagcataaccaccatctagatgaagaaatagaacattgccgctgggcggagtggctcatgcctgtaatgccagcactttgggaggccgaggcaggtggatcactgtggtcaggggttcgaaaccagcctggccaacagggtgaaaccccatctctactaaaaacacaaaattagccgggcgtggtggcacgtgcctgtaatcccagctatttgggaggctgaggcaggagaatcacttgcacctgggaggcagaggttgcagtgagccgagatcacactactgcacttcagtctgggcaacaagagcaaaactccatctcaaaaaaaaaaaaaaaaaattcccaacaccccagagcattctttgtgccaccctttcccatcattccctgtcccctacctaaaagtaaccagaacattgacttttattgctataggttagttttgcttagaatatcgacatttaaagcgtgcaaaggggctgggcacggtggctcacgcctgtcatccctgcactttgggaggccaaggcgggtggatcacttgaggtcaggagtttgagaccagcctggccaacatgatgaaaccctgtctctactaaaaatacaaaaaaaattagccgggtgtggtggcgggcgcctgtaatcccagctactcaggaggctgaggcaggagaatcatttgaacctgggaggcggaggtggcagtgagccgagatcgtgcctgggcaacaagaacgaaactccgtctcaaaaacaaaaaaacaaaaaagcaagcaaacaaacaaaaagtgtgcaaagggaaaggtgagcttaaaaaggaaacaggaaaactggtcagaaaaatgggagcatatcacgagaacttgatttaggctccacctatcacatgcacataccaattggaagctagtgatacacagtagagggcccttggaaatcatctggcagcaccaggaaatacagcaaaatccagtttatggaacacagtaacagtaactagcgactgtatccatgtccaggacagtggagtctgtgaagcaacctgcagtatcttgtgcttagtggcagcaggaaagacagtggtggatgaattctaccgcatgatttgggttttctttatgtgtcctgcaagttggattcttcagactcggcacttttgtgagccactcagtataatctattatctaatactgtcgattaccttactgggtaagggcaaaaacccctattgtgaaagacttgtggctgcgtagccaacggccattctttttgaaacagtcatttctgtttttgaaactattttttttaaagatttttttttcagtaggcatgtacccagcctgaggcataaatcatgattggtccatagcattctatgaaatatgttctttttgccaacattcattaactctcatctttacaaaatttgcaaggcattattttttccattttattgatgtgaactcccaggctcagagaagttactagttttgaacacaggcctgactccatatagctctttccagggcactaccccattattcatccatggtaattctgtatatttttttatgactctggttgtgggtattttactttcctacttgaccttccccactacccttgacaatctgggaattccttaaggcgactcactacccctcaggaaccgctcctaatgacttctaggaagccccctcgccctccagaagtgcctcttctgattcccaggatgcccccctctccgccccaagagctgctcctaatgatcccccaaatccccgctcactgaggaactgcttttttttttttttttttttttttagacggagtttcactcttgttgcccaggttggagtgcaatggcgcgatctcggcccaccgcaacctccgcctcccgggttcaagcgattctcctgcctcaacctccggagtagctgggactacaggcatgcaacaccacgcccggctaattttgtattttttttttgagtagagacggggtttctccatgttggtcaggcggtctcaaactgccgacttcaggtgacccgcccgcctcggcctcccaaagtgctgggattacaggcgtgagggaccacgcccggccaggaattgctttttaatgaccctaaggagagcctccctcatggtctgtcctaatgaccctcagggcagcttcccttccctgttcaggcttgacagcgaatgaggggtttccaaggccacgggattttgttttgaaaaccgagacacccaggacaaaccgggacaagacggtcatcttttcagcactccctgagctcggaagctgcccctaagggccccgacacatttccacgttaggcaaagaggatactcatcccaagaaaactttggcctatcctttcgttagcgacatcctatagtaacctcaccgcccttacccatctaccggaccggcccacttccaggtactagcttctttcaaccctgattagttatgggtgaccaggagcccgcctatgattggccagcttcgcgatccagctagaggctcactggccgcggtccctagtggtacagcgtttcctcccggcaacagcccgagccggcgctcataggctgagcacactgaggtcgggactgggaggtggctgcggcgcgtgctcattggctggtgtatggcttgcagccacccttgaattggttgactctgtacggctgcgcagatgccgactttagaggaggcggagtttcggccttcgcctgctggaaaagcagtaggatcggccagtggcgacagcaggagctgagcctaagccctggcggggctttgggctgtaggtgagaactatagggttttggaattctcgaggatcattgccgctgtagcagtgaccgtgagttttggtgggggaggggcggtgggggtgggtcttccagcggtgagtgatcggcatgtttctcggccaataggagaaggagcttccagaatgggttctgagattggtcctttccaatcttcaaggccaatggacctcgggagaggggggcgggtcatctgggccttattttcttcttcctgcggccgagcttcactcgccaaggcggcggggccgggaggggccgaacctgtgcgcggtgaggttcggggacggtggggagcagggtgcgctgcctttggagtgatgctcgcgggagcggctgcgagggaagggtgcgggagtccgagggggttgttagcaacagctagctttattgagtgggtaagtaccgggcctagtgcttagtgcttcgcttgcatcatctgagctaatcacagcgaccctgcagggcagggggttgggatccccattttacaggtggagaaactgagactcaagtcarctcacacagccaaggtcacatagctaataaacggcagagaccggatctgtattcagagttttgacttcggagccggtgttcttgaatctctaggctttgttactgattgggagggaaggtgtcatgaaacgggagctttccccagggaacagatttgggggaagggaatcctagggttgaagaagggatgaacaattgaggtgagggtgaggaaatcagtttttcaacagttaccgattgcctactctgtgccatgcattgttctaggcatacaaagatgaataggggcagaggctgatgaagcccattagggcccctttgaaggcccggggaagggccccaacattgtattcacatgattgtatgtttttataaaatgtgcaaaagtaagatattttggattcatttttctttttaagagggtcttcaaaattaaataaacttcgggtttctccacacttggagctgcccttgcagaggacttagtccaggtggagatgagtatgtaagcagtatagagcagtggaaggtgcacttaakagtgggctgtgggcaaatttcctggtatgtaaaacagggagaacagtatacctgccatgcaaagtttctgccaggttcatgaaaagcgcctgtttagaaacacgccttatttttgataggaagcctaggagatacgggtaactggatttgccttctctcctaccttacacagttgtgctccgtgttctgctcccaggcctgtaactagatttctggtggattggaggcgcttttctcctttctgagctctccaactctcaaagagagtcttggagctgaaccgccatacctttgggccccagatagggggtacggaactgctggaccctcagtgaggagggtgggtaaaggaaaggacatactggtgttccttctagaatggcctattttcattgatatgctttgtcttttttcagttgaggtggtctattgcgttaccgagctgtggggatgcacccacttagctgaagttctcatctaaaaacaaagtatttattttgctttctccaatcagttatgaagttttccgtgtattgccagtttaaattttgtcctttgagttctgggtacagtgcaactgaacttgtctgtagcttgatttcattaagtactgctgaaactgcatcttagtttcaacagaacagtttcactttagggttttaaaattatgttactaatatcaaagggcttttaaatcatgttactaatatcaaagtacttttgaacccttaagttttgttatcttgtagccacgtaacttttattaggtatctggtttagctgtgccctagggaggagccttggcctcccaaagtgctgggattacaaggcgtaagccaccgcacccagccatgggtggctttcaagttgtagtgtattctgtttaatactctgaaaagtgattagcaaggtgttaataagggagtagcttgaaaggataagggtaaaatatgggcattttagctgtactattaggaccaacaactaaataattagtttcctttttttagctgaaacaattttcttttttttttctttcaagaacaatcctattgcagtaacaatgtctctgttgaaataaggtttgaatccatgcagttttgatacatcaggttctttttaaacagaaccttttcgatctgtatttctagtttatttaaataactttttgttgtttatttaaaaaaaattttttttgagacagggtctcactatgttgcccaggctggtctcaaactccttaactcaagcgatctgcccacctcagtctcccaaagtgctgggattacaggcttgagccaccacacccccaccctaaattacttttctttctttctttctttctttttttttttttttttttgagacggagtttcgctcttgttgcccagtctggagtgcgatggcgcaatcttggctcactgcaacctttagcctcccgggttcaagtgattctcctgcctcagcctcccgagtagctaggattgcaggtgcccgccaccaygcccagctaattttttgtatttttagtagagacagggtttcactgtgttggccaggctggtctcaaacttatgacctcaggcgatgcacccgctttggcctcccaaagtgctgggattacaggcgtgagccaccgtgcccggcccctaaataacttttctagaggtagattccaggtgtgaagtcttaactgtgtcttttgaatttctatattatcttttactgttttcagagttgatgtttccagcacttaattttaatttttatattattttatactcttaatgtgtttcttcagattcctgtctgactaaagggacctcaaaaaggagggaaaatggcttctgagtctgaaactctgaatcccagtgctaggataatgaccttttatccaactatggaagagttccgaaacttcagtagatacattgcctacattgaatcccaaggagctcatcgggcagggctagccaaggtaaggagctgggattgttcaaatggttttgttacctagggcagagcagtaagatttttttcctacatttgggccggaactgtgttttactgaaagttgggtggggtgatgactttagtgaatgcggttctatttgcaagttaattcccgttgttaacatcagaagcatctctgcttttaggtaggaagagagctacttggaatcttcagaaagggggaggtaaagagctagtgtctccaggcctggctgctgttgtgcctcagccctcttggtggagctgggtgctgtggtgttattgaactgccagtgagtgcttatgccatctgacttctcttgctctcatttcagtctcatccagcactctagtagcaatttggcttcccatgtggactttcttcaaggggagagaatgcactggccagccaacatgagtattctggtccttgtaatttgaaattggtttctggtttgtacttctttctcctgtgagttggattcgttatttttcctgagtcaaatcagcttttcatatattctgtcacaatcaggttgagtgctggaagctgaaagaactgcatttctggagagatcctcaggaaactgagaggcagggacctcagtctaagccaggaggaaattttttacaccattttatgttgtttgaattccctaccatatgtgcttgttacattttcaatatgaaaagagaaagcaagaacattggctacaaagctgaggaccagtcttggaccctggtgcctccagagacttgagacgaccacatcctctttcttatctgcagatacggctactgctgggttaataacagcaggcgggaatagcagggcctgcagtgcagtttttcatagcacattgctttttttggttgtactttattagatttaaagttaccaaaaaaatgtcggttattacaagttaaatatttcaaacgcagataaagaaaaggctgatcttcatccaccttctccagtgccgtctccttaagtggtawtagctccctccacacctttttctctgctcatacaaacatacacacatataaaatagtgttatttgttttgtttttaaaagagaatggcatcatgccatatacattcctgtgttggttcgttcattcttttttctttttttttttcttttttcctttttaacaacatatattcctccctctaggtcaattatggattcaactcattcttcttttttctcatgtcgactgtcttgttaatttattactattggaatgggtaatttgattatgtgagtaaaaacagaatgctattggaaggtagctaatgtagagtcttgctccctttccgtattttcttatatgtcctttcagtgttgccttatgcagatgcttgtgagtgtgtgtgtgtgtgtgtgtgtgtgtgtgtgttgttttctcccttgttacataaagtaaaacaatactctctaattaaaaaaaaaaaagctgtatagtattccataaagcagatctatcttacttaactattcaagattagattttttttgtttttttttgagatggagtttcgctcttgttaccccagctggagtgcaatggcgcaatcttggctcactgcaacctctgcctccgggttcaagcgattctcctgcatcagccccccaaatagccgggattatagttgagtgccaccacaccaggctaatttttgtgtttttagtagagatggggtttcaccatgttggccaagctgatctcaaactctgacctcaggtgatccacctgcctcggcctcccaaagtgctgggattaccggcatgagccactgtgcccggcctcaagattagatttttaagaatgttatgcttctttgtaattaaactgtaatctagtgtgtgaaaaaaggaaattctgtacaagtatagagttgaccaaatcaagtaaagttgtgtttgtgatttttttaaagagagccctgggctaggagattgagagagaatcaagtctttaatctcctttcttggtgtccaaataagatactgaagctgggaacaagtattacttaccttaggttgctgcaattaggcagctggttggtggcaaaagtggatcagggttagcatgcctgtgacttactgtgttttggtgaatgtgggtaaatcaaagtaactrtctagtaaaattgactgttaggttggctggtaactacatgcttcctggactctgactggcttgccaggtttctcatctgtctttttgtttcttgtgttcccttcaggttgttcctccaaaagagtggaagccacgagcatcctatgatgacattgatgatttggtcattcctgcccccattcaacagctggtgackgggcagtctggcctctttactcagtacaacatacagaagaaagccatgactgttcgagagttccgcaagatagccaatagcgataagtgagtggaaaccctttcttacctgacatagcacctaggaccctggtgtctcatcctcctagcatctccaggactgctgctgtcctgatgaacagtgtcttcagcaggatggctctgttstagctgtctccctttctgctttttttatggaagcattccctcctctcaggactgtgtcccagtctaaacctgttcctgttcttataacaacaaatcccattgtttttccatcagaagtagaatcattttctgactctaaagttgcaaggagaaagttggatgtggtgcacaaggagcttttgctgggtattatcaaccacctgctcatcaaaagtgctttagttccacttcctctctctcgggatgctctgtgtttaattgtgctggaatttctcactgcccatccagcctgctagctcatttctgttttgacattaacagtgtgagtaaaccaccaagctggttgctattttctgtcactccttctttctctgtacattcctgtctcttttagagatatctttctttgtgtaggcctgttttcagttcttctctgctgttgggtttttttttttttttttttttttttgagatggtgtctcactttattgcccaggctggagtgcagtggagtgatcttggctcactgcaacctctgtctcccaggttcacgtgattctcctgcctcagcctcccaagtagctgggactacaggcacgcgccaccatgcttggctattttttgtattttcagtagagacagggtttcgccacattggccaggctggtcttgaactcctgacctcaagtgatcctcctgccttggcctcccaaagtgctgggattacaggcaagagccaccactcctggcccttctccgctgtttttaatgtttagttctcatttttcctgagattcacagagaataaattttgtgtttccttgttcagctctgactactccatctttttttttttttgaggtggagtctcgctcgttccccaggctggagtgcaatggtgcagtctcggctcactgcaacctccacctcccgggttcaagcaattctcctgtctcagcctcccgagtagctgggattacatacaggcgcctgccaccacgcctggctaatttttgtatttttagtagagacggggtttcaccgtctctactgtcacccaagttggagtgtagtggtgcaatcatggcttactgcagcctcgactgcccaggctcaaaatgatcctccttgctcagcctcccaagtaactggaggtatagataggcatgtgctaccgcgctcagctaatattttttattatttgctgcccagtttggtcttgaactcctgggctcaagcgatcctcctgcctcagcctcccaaagtgctgggattataggcaygagccactgcatccggctgacaccttaactccttttatttatttttttttttgagacagaatctcgctctgtcgccaggctagagtgcagtggcgtgatctcggctcactgcagcctccgcctcctgggttcaagcaattctcctgcctcagtctcctgagcagctgggattacaggcgcccaccaccacacctagctaatttttgtatttttagcagaggcagggtttcaccatgttggccaggatggtctcgatctcttgacctcgtgatccacccgccttggcctcccaaagggctgggattacaggtgtgagccaccgtgcccggccaaccttaactcttaaaacayctaccttgctggccaacctgctgaccgatgagagaatttacataaaggcatgttgaagaaatgtggggctctgcaggtgaaaggctgtatccttcctgccatccttattgtctgatttttgctacacatgaggagcaaactcacctgccttctgtttctcacatggaattcagccaggggcttcagtctcctcagccttttttccctttttgttaaggctttttcttttcttttttttttttttttttgagatggagtgtygctctgtcacccaggctggagtgcagtggcacaatcttggctcattgcarcctccgcctcccaggttcaagtgattttccttcctcggcctcccgagtagctgggagcccgccaccacgcccggccaatttttttgtatttttagtagagatggggtttcaccatattggccaggctggtctcgctttttcttcttttagcacacttgttttccttttaaattaaccagccctatgtctattcctttcgtcctaatacatagcagattacctttaaagtaaaaacataactttttttttttttttttgagacagagtctcgctgtgttgcccaggctggagtgcagtggcacaatctcactcactgcaatctctgcctcccaggtttaagcgattctcctacctcagcctcccrtgtagctgggattacaggtgcccaccaccacgcctggctaatttttttgtatttttagtagagacggggtttcaccatgttggtcaggctggtctcgaactgttggcctcaagtgatcagcctgccttggcctcccaaatgctgggattacaggcatgagccaccgtgcccaacctaaaaacctaaattcatgaaacagattagttgacaataggggagttaattgtatttcagagagaatgttaggtctctaaaatttattattccctaggttgacattaaagtgtaaggcagttacttagtcagatttttttttttttttttttgagatggagtcttactctgtggcgcgggctagagtgcagtggtgctatttaggctcactgcaatctccgcctcctgggttcaagcaattctcctgcctcagcttcccaagtagctgggactataggcgccygccacaccacccggctaattttttgtatttgttgtagatacagggtttcaccatgttagacaggatggtcttgatctcctgacctygtgatccgcctgcctgggcctcccaagtgctgggattacaggcgtgagccattgctgctggccagctctgctaatttttaaagtttttgtagaaayaggattttgccatgttgctggtctcaaactcttgggctcaagtgatcctcctgcctcagcctcccaaagtgttgggattacaggcatgagccactgtacttggctagtttgaatctaaaagaagtttttttttttttaattaaattttcagtattaagctaaagagtatagatatttttagactgggtgcattggctmacttctataatcccatcactttgggaggccgaggttggaggatcactggaggccaggaatttgagaccaacctgggcaacattgcaggacttcatttctacaaaaaataaaaacaccagatgtggtggtgtacacttgcagtcctggctactcgggaggttagggcaggaggattgcttgagcccaggagttcgaggctacagtaagctatgatcacaccactgtgctccaggctgggcagcagagcaaggatcttgtatagttttttttaaggtatagttttcttttctttttttgagacagagttttactctatggccgaggctggagtgcagtggcgttagttagctcagctcactgcagactcctcctcctgggtttaagtaattctcctgcctcagcccccaccctaaatagctgggattacaggcgtgtgccaccacgcccctctaatttttgtatttttagtagagaccaggtttcaccatgttggccaggctggtcttgaactcctgacctcaggtgatccgcccccgccaggcctcccaaagtgctgggataacaggtgtgagccacacccctggccaaagtgtagatatttttatggctttatgtagataggtagatataaatatgcgtatatgtgagtacgtattttcctaattggaatattggatgtgcaaaaatctatatttttagagctattttatatttttactaaaatatttgttgtttttaggagtgattacttggtgagtgtcagccactgcgtagggcgcttgggcatatagcaggggtacttacaaatgagccctcttggagcagcttccttttggctggttcaggraggtgaatgctgttggaaagccttagctcttcacatgctgctgggttttggttgtctgtggatatgtagggaccttgggtcttggtctgtragcccattttctccctgggtggccacctgaatctagcaaggtgtagtttaagtagagtctcttcagagagttgaggatgttgtgcttgttaaggaagaccggtttacatctgtgtgtacattaccttcctcaggcttcctcaggcccagtgctcatggaagggacgttgagggactgactacgtattagagccttgaaggccaagattatgccttgttcatttgaaattcttgctgtcactggaataggggattatgtcttgtaatgttcataatgcctaataaacccctgtaagtggtttacatgtttctttttactttcaaaaaggtactgtaccccacgctatagtgagtttgaagagctcgagcggaaatactggaaaaatcttacattcaatcctccaatctatggtgcagatgtgaatggtaccctctatgaaaaggtgaggctcactggaaaccctctgtgcagtgtttttgtaattttgtaatacctttttttyggcccggcacgtagtaggcacctaaaagctgtttggtgaatgggtggatgaacagatgatctacccccagctgatgttgctgtgctggcctaattgtgggccattttgcatgtgactgaattttatttctcctgctttacatgtgaattggatgatgtggtgttcttttcaagggttgttagcatagtcggtgggtggtagctgatgagttcttgaaagggtgggttggctctcagataatgaaatgaggcagtgtggtttctgcagaaaaaagatgactgactaatctaatgaaargggtatacatttaagaagagaaatacatttagatttttcagaaccctcaaacaagattctgtggcaaaagctattttaaccacttttattggcttgaaatcctgccttaaatatggtgaaaggggagaatatttgggaatatcttcagatgactgaaaaacagtagggcattcagggattatcactcataattgttttcatattttaattttttttttttttgagacggagtttcgcttttgttgcccgggctggagtgcaatggcgcsatctcagcttaccgcaacctccgcctcccgggttcaagtgattctcctgcctcagccacctgagtagctgggattataggcatgcgccaccatgcccggctaattttgtattttttagtagagacggggtttctccatgttgctcaggctggttttaaactcccgacctcaggtgatccacctgcctcagcctcccaaagtgctagaattacaggtgtgagccactgcgcttggcccatattttaatgtttttatcaattattggaagagttaaaaaaatgaattccaggccgggtgtggtggctcacatctgtaatcccagcactttgggaggctgaggtggatggatcaggaggtcaggagattgagaccactctggctgacatggtgaaaccccgtctctactaaaaataaaaaaaaagtagcctgcagtagcgggcgcctgtagtcccagctactctggaggctgaggcaggagaatggtgtgaacccggcgggaggcagagcttgcagtgagccgagattgcaccactgcactccagcctgggtgacagagcaagactctgtctcaaaaaaaaaaaaaaaaaaaaaaaraaaaaaaagaattccagttttgttgatagcagtttttgggggtcagggaaagtcagtcttgtagggatgaatggcaggaagatgctgtaaggatctgggatggagagctacaaaagtcaggcataataataatacaggacctagttatgggagatgggctcccagctggccattacaactcgggaaaaggatattccacattttttatgaagacactgcctggtggaaatcagggctaaaaagccacaacattgccatagttttttgttcttttgtttttgagacagagtctcrccctgccacccaggctagaggttagtggtatgatcatagattactgtaacctcaaacaccggggtcaagggatcctcctgcttcaccctcccaagtagctgagactgcaggcacatgccacttcacctggctactttttttaatttgtaatttttttgtagagactgggccttgctttgttgcccaggatggtcttgaactcctgggctcaagcaatcctgccttggcctcccaaagtgttgagattacaggcgtgagccaccacacctggcccactgtcatagttcccatgttttgcgatttttttttttgtggtcatagagttttttttctattttgacctaaatttctttagcatcagttcaaacttttcctcttggggtttcaaacaggtgactcttggtcgggcgcggtggctcaggcctgtaatcccagcactttgggaggccgaggcgggtggatcacaaggtcaggagttgaagaccagcctggccaagatggtgaaaccccggctctactaaaaatagaaaaattagttgggcatggtggtgggtgcctgtaatcccaggtgcgcgggaggctgaagcagggaattgcttgagcccgggaggcggaggttgcagtgagccaagatcatgccactgcactccagcctgagcaacagagcgagactccgtctcaaaaacaaacgaaaaaacaaacaggtgactgtcatctctttattcatctttcctacactagtattcacaaagtaatatttgccctttgaaggtaaatggtgtcagttccagtggtagccgtgaaagtcaatgaggaatgctatggtcttcacgtccatagtgttttgacattattcccaatrtttgtcagagatgacagcttacttgtgacctactctgatttgtaggttcagagcctcggtttctatgcaaatgtaacttgccctggactgtcattgyctttgcagcatgttgatgagtggaatattggccggctgagaacaatcctggacttggtggaaaaggagagtgggatcaccattgagggtgtgaacaccccatacctgtactttggcatgtggaagacatcctttgcttggcacactgaagacatggacctctacagcatcaactacctgcactttggagaaccaaagtcctggtacagtctgcctgcagtcggcaccgggcttctatgctagagcacgggctcatgttcattgtgcgtgggaagcacctcaggattgtgttaaagggcagaccctggttcaggcttggggtgacattccatgttttaaacacactttcaagtgctaagatgcttgctgttggagctctggtgctcggaccaccttttgagtagggaggctttagagagcagggtgctggcagttacccaaagacacgggggctcttccaggctatcccactgctttctaattttttttctgaacaggcctgaggcatttcttagcagcagacttccaagactagagtcactcyctcagatgacagaaagctttcttttcgtcatggaaaaaataytaatacttggggagcagcagtgtgtgcttaacacataagggattgcgaggctattcagcatgcttccygttctccagagtgttattcttgttggtgagacaaacattggttctctctcctctctctgtgctgacccatctttgagtctcagcatttttttttttctattttgagacagggtctcactctgtcacccaggctggagtgcagtggcaccattatggctcactgcagccttgacctcctgggctcaagtgatccttctacttcagcctcccaggtagctgggtttacaggcgtgcaccactatgcccagctaatttttttccttctttttttttagggtagagatggggtctcactatgttgcacaggctggtctcaaactcctgggctcaagcagtcctcctacttcagccttgcaaagtgctaggattacaggcatgagccactgtacccggcycatctcagcattttagtgaaggtgctgcagataacagcagtgaataagatggatgagatacctaccctcacacagataggagactggtcaggaggtagaaagtgwgagagaatgctcatacggtgtggggacagctctgaaggggaagaagtgggtgctaaggtccacataagarggatagatgggattaaagaaggcttctttcaaagaggtgacaagtgagacctaaaacatgagaaggacataaccggstggagtggtggtgggcttagcagctgggagattgagggaagtgtatccaggcagttggaaccacagacgcagagctcctggattragacagcacatgagggccaggcgtggtggctcacacctgtaatcccagcactttgggaagccgaggtgggtggatcacctgaagtcaggagttggagaccagcctggccaacatggtgaaacccgtctctactaaaaacacaaaattagccaggcgtggtgtgtttagggagctagggggagtctgctgtagtttgggtgctgtgtaaaacgatgagaagtgagtgatgaggccggaggggacatcatggggcacattatggggagtcatgaaaaccatatccactttcaggtcttttttcagcatcttcagccatgttctttctcaggggttttcctttcttctttcaagtgctctccagtttctaatcttgggggaaagaaccttttgagcctatgattatctcctaactactgtcctgtttttccttcctcagaaggctagacttgtaggatgtgtaaatgtagcttttgtgtcttcaccattgtttactccaaaattcactgctcctggatttttgaattctcttataaaagaaggttttccagttattatatacattcttaggtcctctgaagtgggacctccagagccttctgtatagggttgcctgatggatcccagagtcctttaggtgacatttttgtcaactcttcttctctgttttgttttataatgaagctgtttgcagtgggaggatttgttgttactgtggaataatcttcagaagagattaaaaaggttaaaacagagttactgtgagtttcagaatataaagtttaacaattttgcaaaagtttaatagtcctaggtgttcttttttacttttcattttttaggaagagcagtttctatggtgtttagacaccctactgggtagagaggtaattgattgttgggtaatcagtatatgtagctgttggggagataaagggaaagtgggttcatcagcagatacggggctaggtctcttaagtgtcagatccatctttcactttgttttccatcttcctcttgcctgcccccagttaggcctttcaagcatttaaaaatactgagcayttttaaatactgaggttatatagtgacatccttctttttttttcttttaaaaaatgttattatatgaacaacattataaaggagagtaatattatgtaccgtaaatcctggctcatggtgaacacttaataaacatcttattaagtgaatgaatatagaagaaataaattcactcaccttctttatgggctccttactcctgtgcccaaacagtctaatatttcattttttcagattcctttctactgcttgggaagttaaaaaaaaaatctgctatttcaaggtgttttgagagtgggaataagtcccttagcttctgtacctgccctccacccagcctctgatgctctcatgtgattgcaggtactctgttccacctgagcatggaaagcggttggaacgcctcgccaaaggtactgtgtctcttctgtttgctggattggaccctcctatgagctgtgctccttgctctgcactaaaatgtgcgttccccatggtcagatacttgcaggtcctgttgcaggcctgcagacgggggtgagccacactggttaccttaagagggcagtgacggagccttttcttcctttgtcctgactgtctgtgcctcagttttaatgagcaggggtgtttctttgaccagcgataatgaaccagacccagtatgactggtgtttccactaaagacccaaatgttaaagaaaaaattgaactttatgctttgtttcttttaagtggacttagatttgtatgtctggagaacataggaaagcctgggtagatgatactayagctgcattactgaaaaaagatcagggatacaagtgactggagaaaaggtcctaaatagtttcaaagctctataagaacagaggcagcttgggtgaccttggtttcccaaacaggatttcattacccacgtaatgccctacatgggagtgagcctagaggctcattgcagaatcttagaattggtgcggagctataaggatcctcagaggtcacattggtgatgcatcctctttatcattccgatgagaagcacaggtgtgaagtgactccaggattgcrgagctagtgtggagcactgtgttaacctgtaccctttcaattaaataggctttttcccaggaagtgctcaaagctgtgaggcatttctccgccacaagatgaccctgatttccccgttaatgctgaagaaatatggaattccctttgacaaggtgagctgatgttacatgccaaagttctcaggcaccaccctttctggcctttgttttacagttttattctagttcatcactataccaagagggggccaaagcttaaataaactatgtaacaacactttgatctaagagcattaaaggtggggccactgtagcttcctggtgccagaggagagtcagatcccctagaacagtgttcatttggaggaatggttaattatagtcatgtcatctgatatgtctgggctttgcattttatagaagacagcaaggaccccaggggttttatgacttaccctttgttactcagctaagttgtggtrgagctcagaattccagttctgtggacttctgccatttgaagcagctgcttcaagtctgctcttgttcaggtgactcaagaggctggagagtttatgatcactttcccttatggttaccatgccggctttaaccatggttttaactgtgcggagtctaccaattttgctacccgtcggtggattgagtacggcaagcaagctgtgctggtaagtctgcttgatttctttctataacaccatgacaaaaatgagcaaattctggttagatacgttggctggtgattagagtatttctttgagctgctggaattcagaaacaagcagctagcaatgtgtcagagtactaacattttgtgttcataaggaatttttaaaaatgtgttcagaattgggaagtataaaatgaggttcttaagtccattaggcattaaaaccacatccacacacgttaatactcttgyttatccattccragatttctctgttgaaatttttaggggtttcctttactctagggaagcagcagggtcgggcctttgactgatagtagtagacttgcttgtgtgttcctggcttggacagggaacaagggcaggtggctcaccgtcctgggggcctaagtgcagagcctaaccaccctctgtgaccccgagttagtgcccaggtagatttgccccagtagcatgtgctctctgcctttttttccctgcttcccttcatgtttgaaggtcctgcaaggataayatgccctcagcctgtgaaccaaaacaatctggttataaaccatcttgcacttgtttccatgtggagggaggagctaggacgtgggggtgagttggaagcagcaaggtatgctcacctggtgctcttctggttcctgctgacagtgctcctgtagaaaggacatggtgaagatctccatggatgtgtttgtgagaaagttccagccagaaaggtacaaactttggaaagctgggaaggacaacacagttattgaccatactctgcccacgccagaagcagctgagtttcttaaggagagtgaactgcctccaagagctggcaacgaggaggagtgcccagaggaggacatggaaggggtggaggatggagaggaaggagacctgaagacaaggtaacccagcagcccttttgtcctggctgcgtgagggagggatgtctgggtaggtcctgtaatctgtggagaggctgtttcttgttttttttgttttgttttgtttttgtttttgtttttgtttttgatggagtctcgctctgtcgcccaggctggagtgcagtggtgcgatctcggctcactgcaagccccgcctcccgggttcaggccattcttctgcctcagcctcccgagtagctgggactacaggcacctacagccacgcctggctaattttttgtatttttagtagagacagggtttcactgtgttagccaggacggtctcgatctcctgacctcgtgatccgcccacctcggcctcccaaagtgctgggattacaggtgygagccaccgcgcccggccgaggctgtttctaagatgccgtttgtgccttggctaagggagtgttcttggtaaaggctccagaaacctgagagccagagcattcaggcactttctgaatgagagacctgtagtgggcgtgtagtctgctggagcaaggcgtcagttatatgagggtcgggggcatttatgtgcgaaggtcgggctccctctgagccagaaaagtcatgttttctcatcatatcagagagtcttttaaaaagaagtgtagtgaggatgagactcaagggcattggtratgtcgtgatttaagtctgcagtgctattggtggctgagccaggggatctgtgctctgaggagaatttatcctgggccatatgggaaagaaaggaggaaccgttccttggtacctgctatatgccaggcactttgccagctactctgcataccttttcttaatcctcacaacaaatctgttaggtgggtggtaatacctgtattttccagatgattgaacaaggtcagagaggtgaagtcccttgtctcaagtcacaaataagaggtgtccctgagttttgagccaggcctgacaggctctggccattcactttgggttgtgtgtggatgtgtatgaatgtgtttgagtaagtggatgtatatgtgggctcttaaaagatttgccctctcccttgcagcctggccaagcaccgaatagggacaaagaggcaccgagtttgtcttgaaataccacaggaggtgagtcagagtgagctcttccccaaggaggatctgagttctgagcagtatgagatgacggagtgcccggcagccctcgcccctgtgaggcccamccatagctctgtgcggcaagttgaggatggtcttaccttcccaggttagttgactatggtgtattttccacaaccctaactcatatatgtgtcccgtgttagatgccatattgagtgctgggtcagaaataaaaaaggcagagtgacaggtccgtgagcagatagcatacttggagtgtgagaagtgctttgggtagggatgtacagggaggactggacacgtagggaaaagctcctccctctgcctggtcaggggtcagggaaacactggaggttttggtgaaggtgactcttacaaggtaagyaggaccttcccaggcggacagagagagaggagggatgtagaaagggagtcccagatgggaggagcagggcacaggcatggagatgggaatttttttttttttttttgaaatggagtcttgctctgtcatgcaggctggagtgcaggggcgcaatcttggctcactgcaacttctgcctcctgggttcaagcgattctcctgcctcagccttccaactagctaggactacaggtgcctgccaccatgcctggctaatttttttttgtatttttagtagcgatggggtttcaccgtgttggccaggctgatcttgaactcctgacctcaggtgatccgcctgcctcggcctcccaaaatgccaagtgggattacaggcgtgagccactgttcccagcagagatgggaaatattaatagcatggtccacttgggggaactggtggggagtttccctcaattgaatattagggtggaaggcagctgtgtgaccagaaggtgacgctggagaaataggagatgatgtagggctgtctgccattttcatttgctcacttggaagcttaagaagccatttatattttaaragagggagtggtgtgatcagtgctgtttagcagtcacttggaaggtcattgaggctagatttgttagagaaaggcttgtatctgtcttgggtcaggtatgacccaamgatgtggtctgccgacagccaggcagcactgtggactgacaccctgggctgggctggcttctcttcagcagattttctttcccttttttctcttcaaatttatttatttatattgacagataaaatcgtgcatatttgtcttgtacaacataatttttttgtttgttttagaaacggggtcttactgtgttgcccaagcctttgtgaacacagctcactgcagcctcaactttytgggctcaagcaatcctcttgcctcagcctctcaagtaggtgggactacaggcatacaccacgcctggctaatttttttttttttttttttttttttgagacggagtctcactctgtctcccaggctggagtgcaaaggcatgatcttggctcactgcaacctccgcctcccgggttcaagtgattctcctacctcagcctcccaagtagctgggactacagatgcttgctaccacgctggctgatttttgtatttttagtagagacggggtttcactctgttagccaggatggtctcgatctcctgacatcgtgatccgcccacctcagcctcccaaagtgctgggattacagcagtgagccaccatgcctggcccatgcctggctaatttttaaattctgtagagacagagtctgactttgttgcccaggctggtcttgaactcctgggctccagcaatcctcccatcttggcctcccaaagtgctgggattacagttttgaactactgctcctggtccaacatgatttgtgaagtatatataagttgtggaatgggtaaatctagctgtttaaaatacatattcacatagtggtcatttttgcagtgagaacatttaacatccaccctcttaatatttttcaagatctttagattttctagcatgggctaggtagccaggtctctgctgagctcagacttgymttacctgcaggagactttggaggaaatggcagctgccccttactgagtgtctgctgagtgccaggcggtgctcaggagtcttatttatgagccctgtagatctgtagtagcatcttctcattacagaggaagaagctggaggccaggaggctgagcaaatagccctggctcacagtgcccctcagtgacagagccaggattggaagccaggtcccattccccgcccatgttccttgtgctttgccctctgcctttcatcaggttcacatgtgcaggaggaacttggctctgtctaatgtgtatgtgtgtttcagattattctgactccactgaagtcaaatttgaagagcttaaaaatgtcaaactagaagaggaggatgaggaggaagaacaagmagcagctgccttggatctttctgtgaatcctgcrtctgtagggggacgccttgtcttctcaggctccaaaaagaaatcatcttctagcctgggctctggctcttcacgggattctatctcttctgattcagaaactagtgagcctctctcctgccgagcccaagggcaaacgggagttctcactgtgcacagttatgccaaaggggatggcagggtcactgtgggagagccatgcacgaggaagaaaggaagcgccgctagaagtttcagtgagcgggagctggcagaggtatgggctccaggcagtggtgtggggtggggagctgccctggaggacaccctgtcgggaggggatctgtgtgggggagggaggtggatctgtgtgatggaggtgctgcaggagggcaggagagaccctcagtcagtgcctctagccagcagtggttgtgtcaaacaaaagcctggggtggcattcactctcccagcttgttctttgctgggagttgcttttctgttatccctgtggctactgattccaagaattgcatcaatgcagcctgagtcacagcagcagatcctcctcagcccacttggatcacaatgccttttttttttttcttgagatagagtctctgctctgttgcctagctagagtgcagtggcatgatcttggctcactgcaacctctgccttccaggttcaagcagttctcctgcctcagcctctcgagtagctggtattacaggtgtgtgccaccacacccagctaatttttgtatttttagtagagacagggtttcaccatgttggccaggctggtctggaactcctgacctcgtgatctgcccacctcagcctcccaaagtggtgggattacaggcgtgagccactgtggctggccttttgtttttttttctttttttttttgagacggggtctcgctctgttgcccaggctggagtgcagtggcacgatcttggctcactgcaagctccgcctcctgggttcacaccattctcctgcctcagcctcccgagtagctgggactacaggcgcccaccaccacgcccagctaattttttgtatttttagtagagactgggtttcaccgtgttagccaggatggtctcgatttcctgaccttgtgatccgcctgccttggcctcccaaagtactgggattacaggcgtgaaccaccgtggctggccttttcaactggggtaggcaggaactcttcctctgatcctcattgccttagcggcaccagggttagaatggctgctgttggagcccacgtgtttggaggtttgggatcagatgagatgacctttcttaccttgaaattcaagggtttttttcttacacctcttgactgccctgtagactcccagtatgacattgatagagcatccttttggagaccaagatgcattcccaaagctataaacacgaacatgtgtgttcaggcttcctccttaaatacatgttgtcaccaaaagctgattcctgcttttgtgcaaaatggctcttggtgggtctgccactctgagtgatcagtcatgtcagatgccactggacccccactacccaagtgactttccctgactccccagccttggagcttatgtgggtcaagctgcagtctttggtgaggggtgggagatagaagaagccagtgcagaaggtcctctttattccctattcccttacctttagtttttaaaaatgtatcttaaaaatcttcactatggaaaatttctgacgtacgtacaaaataccatcacgagcccccgcgtgtactcatcatatatatgattaacatttggcacatttgctttctgttttctttggctgcagtacttgacactcagtcatattcacatttccctagtgttgccaatagtccctttttatggtaggtttgtctccttgttgttgatactcataacttttctcggtgccttctctgaatctcagggtacggttttggtagacttctttttaccttgtgaatgttcctctttccatcccactgtggttgcaggctaatgagctaataactactgtgtttccttctcattgcctctgattgcagttctctgtgccttcttatggcagcttccataaaggagggctttttcagcctggaaaccagagtctctttaactcccagttgccacctagcaattcttccttcgcagaggccccgggccatttcatccatcctactgttgactactgttcactacagttcatgctgtcctcttgctgagtcttcctgacattcttgtttctagttgcaatcacaatcacaaaaagcagctaagaagtagcaagagctcactgtatattaaatactttgtttatcttttttgagacagggtcttgctctgttgcccagggtagagtgcagtggcacagtcttggctcactgcaacttctgccttctgggttcaacccatcctccccacctcagcctcccaagtagctgggactacaggtgcacaccaccactcttggccaatttttgtatttttcgtagagatggggtttcaacatgttgcccagactggtctcgaaatcctgggttcaagtgatcctcctcccttgatctcccaaagtgccgtgatttcaggtgtgagccactgtgtgccccaccgccccccagctgttaaatactttatatgcattgttcagtctttgtattactgcttaattaatcttattacagagtcaagtttttgtgggaattttttggggtgggaggtgcaggamgccaataaataacacctgtcctttttcctctcaattcggaactmtttaattgatgatacaagagtcaggcatatggagctcagaatgtcgctttatttacaagttaaaatgattgaagaaagtgacttttaacctgtgactaaatggccctgctactttttttttttttgtggggggactgagtctcgctctgttgcccaggctggagtgcagtggtgtaatcttggctcactgcaacctccacctcctgggttcaagtgattctcgtgccccagcctcccgagtagctgggattacaggcatgcaccaccactcctggttaatttttgtattttttttagtagagatggggtttcaccatgttggccaggctggtctgtaactcctgagtgcccgcctcagcctcccaaagtgctgagattacaggtgtgagccatcgcgcctggcctactcatttactcttgatgtctccaggcccctctagaggcaaagcatttccatggaagcactcagcttccatgtggtgtggatgtaggccagaatgcactccctctccaaaagacagatcctagtgaagtgaagcacagctttcaagggggtggggagaagaaaagccaggactccttccgtgtggaagtgtgctaggggaaggggtcttctctctgacatgtctctctttttcagtcctctgctcaaaaacccttgagtgtcttcttggttcctttttatttcggtatgtacttttcaggccgagcctgatgataataccctaataaataaccctctctgctccatcgccaaccatccctccacctccaacatgtgctggcttgtttgtttgaactacttaaaagtctctaaaactgtcttggctgccctgccacttccctctactttctaatcatttatggcatgcctactctaggccaggactgtgccttcaaggagctcacagtctaggatagataggtaagagcaaatcattccagtacttaatgatacgtgttgtggtacaagtgggagagttagcagctcagcctggggttgcagtgtagagttctggactgcctgagagaaggaaacagtttaggcctgaggttagaagaatgccaggtggacagaatgaaatcgaagagaatctgggagaggagggtgttctaaatgctcatgataactcatgccagggtcaaagcacttggggatctgcagtggtttagtttgtctcaggcatataggactggagagggcctcaggtggtgctgttgggggatgtcaagagccagaacctggagggtctgccttgttgctctgtgaagcagtttgacctagttgtggtgtagggagcagcagaagggtccccaccatatgcaccatatggatttggaaattgaaaactttcataattcattcttttaaacgcacacacaaagggccgggtgccgtggtgcatgcctgtaatcctagcagtttgggaggctgaggcgggtggatcacctgaggtcaggagtttgagaccagcttgtccaacatggcgaaaccccatctctactaaaaatagaaaaattagctgggtgtggtggcgggcgcctataatcccagctgcttgggaggctgaggcaggaaagcgcttaaaccctggggtggtggggggcggaggttgcagtgagctgagatcacaccactgcactccagtctgggcaaaagagtgaaactttacctcaaaaagataaaaaaaaaaaaaaaaaagcaagaaagaaatgcacacacaaagattcagagggaggccacgcagggtgccatacacctgtggtcccagcactttgggaggctgaggtgcgagaattgcttgagcctgagaggttgaggctgcaatgagccgtgactgtaccattgcactacagcctgggtgacagaatgacacagtatcttagaaagatgcagagcgaataatacagtgaacccacaaataatttttttttgagacggagtcttgctctgtcgcccaggctggagtgcagtggcatgatctcggctcactgcaacctccacctcctggctttaagcaattctttgcctcagcctcctgagtagctgggattacaggcgcctgccaccatgcccggctaatttttgtatttttagtagagacagggtttcaccatcttggccaggctggtcttgaacccctgccctcgtgatccacctgcctcggcctcccaaagtgatgggattgcaggtgtgagccaccattctcggccaaacccacaaatattctaacaggtgtcaggatctttccatatttgctttgtttgtcctgttttcaatttgctgaagtatttatattaaaattatattatcttcattagtatataatgtacatatttttggggtacatgttgatactttaatacattaatttgtaaagattaaatcagtgtaattggtaaatgcatcaccttaaatatttgtcttgtctttatgctagaaacattcaaattattctattttgaaatgtacaatagattattgtaaactatagtcaccctactgatttgtcaaacactaggtcttatttcttctatcagactatatatttgtgcccattaatctgcctctctgctgaagtatttgaaagcacatcccagataccttgtcatttcttccctacttcagtgtgtatctctgaataatatggtcatttttggctgggcgcagtggctcacacctgtaatcccagcactctgggaggccgagggggtggatcatctgaggtcaggagtgcgagaccagcctggccaacatggtgaaaccttgtctttactaaaaatacaaaaattagccaggcgtgttggcgggtgcctgtaatcccagctactcaggaggctgaggcaggagaattgctcgaatctgagaggcggaggttgcgctgagctgggatcttgccattgcactccagcctgggcaayagagtgagactccatctcaaaaaaaaaaaaaaaaaaaggaaaatatggtcactttcttagatgataactatgccattattatacctaagaaaactacaaaaattctttagcataatttactatccagtccataatcaaatttcctcattgtccaatctgttttacagttgattggtttgtatcaggattaaatcaaggcccacacctttgatttgccgatgatgttctgaagtcttccttaatgtaggccagcgcctctcccccttttttcctcaccattgacttaatcaagaagctgtcattgattgtccagtaaagggttttttargtactgcactgatgttttggaagattgttctggaggcagtataaagattttgagggggaggaagaaggaggcaaaattagaaattgtttaacagaggttctcttgaaggtggaattatggatgatttcacttcctacatttatgcatcatttgaatatttttatgattaacatgtgatttttataactaaatacttctacttcaggaaaggaggaaaaaagatttgaaacagggaaaccaattaggaacctgtttctttagtctgagagagaggtagtgaggacctgtaggtggtggtgatagggatggggagcagaaaatggacttgagagctacttggaaggtaggcacataggactgggtgactggatgggggtgagtcagagggtagcatggggcttgactcgggtttccagctttgagttcttgggataggtggtggtgtcatccatataggataatggttataagaaaactaaagggtttttagtgtgggccaggaaatgagttgagtttgggtacgtctagagggggacttttgtgaggtaggctatggagacacatagacatagccttgaagctggggtgggagggttggtctgtgggtgtgggagtcaccaggagggcactggtgggcatggaagaatgtgtgtagagtgaagaacagtttcacagtgtggggtgacaggagagggcccaggtaggagaatgtgagggagcagccagaggtcaggagaactaggaaagaacagtgtatccagtgccagggcaggagaagagttcaagacagtgggagatatggccaagtgtgccttgtattaaagggcagggtcctgccaagtgggggaagttgaagaggtagtgattggattctggggatctaaggaagtgggagtgcaggtggagggacaggaggggatggctgcagataggttttttttttttttttttgagaaaaggtcttgctgtgttgcccaggctggagtgcagtggtgcgatctcagctcaccacagcctcgacctcccaggcttaactgattctcccacctcagcctctcaagtagttgggactataggcatgtgccatcatgcccagctaagttttttatttttgtagtgatggggtatccttatgttgcctaggctggtctcaaactcctgggctcaagtgatcctcctgtcttggcctcccaaagtgctgggatataggcatgagccaccacacccagcctgtgtttttaaattgtggtaatatatacacggtatgagatttacctgttttaacagtttttttagtaaacagttcagtggcagtaagtacattcactttgttgggccactgtcaccagaatgcagatggttttgaggtgggaggagatggggaatttatctctgagggtcgcctagagtagtcagataactacctctgcttagtgcaacccagcccttttcaaaagccactactcttagaaacacttcattgctttccatctagttccctttcttctttgaagccctagagtactagtttcttaatgcccttgccataggctggtgaagaatataaccttctagaagctgggccctgtgccacattcatcctcatttcttgagttaccagcacggtccagagggcttggcctatgaaaccctctgtaatgaggatggaatgagtaaatggaaggtcaggtttgttttagtaagaagccaccatcagaattaattgactgggaggaataagggacagatagtcaaggtttgggggcagaagctgagcaactttgtccatccctggagaggtcttrtagcactggatctatatttgtagacaactgggttccttagagcacccttatgttcccccacccccactttaagcatccccaagctgtaatctgggctgcctgctgttcagtttccatgccaccatctatgtcaagggccttttttaggtcagtctggtaaactgcagtttttggtaaaagcaccctggctggctgacactgccgaaactgtagagttttcattacctactgactgagccacagccatatgtctgctgcagaagttcttgttagttcaagctactttgaaaagtgagttcccaaaacaaggtgggagaacaattggttcttctctgtacagaataaaccctatcaggaacactaaccttgaccctggtgccagatgttggatgagggaggaaagaactcaggagccttgagttccagctttcttcaggcagggccctgggagtctgcctgctatcccgccctgtctgcaaaaagagccctctggggaagggtttattactaccgttttactggtggggctgctactcatccaggctcacacagctgctagttggtcgaaccctgacctttctgttatatactgagggaatttagaaactggagcaatcccagggaaggcagcaccatgagaagggtgcggatgccatggtagcaggaggagtactgtccaggagatgaggaaatgtgaaaagatattcaaatctttgaatggacctgactactttggtcagaggcagcatgacggtagtggaaagggctcagacttcggacttggacaccaggtctccctccctgaggttagagatcacgtcttgtttttctctgcattgccaaaacaagtattcccaccgtatactgggtatataagaggtgctgtgaatatactgatcatggaaaaggtgtcctcttcccttcccaagctgcattctggtgttcttgaccttcacccttccacctcctttggaacttggatcttaggtacctcctaccctgtatttgtttcctattgctgctataacaaggtaccacaaacacagaggctgaaacacttgttctcttatggttcttcagttcagaagtctgaaatgggtttcactgagctaaagtgaaggcatcagcagggctgtgtaccttcctggaggctctcaggggaggacccatttccttgccctttccagcctccctgggctgcccacattccttggctcctggacctctaggtccattgtcaaaggcagcggcatccagccaagtgtctctggcatcacatcactcggacagactcttctgcttccttcttctgttgtaagccccattgggattacaytgggcccacctggatgatccagggtacgctccctattttaaacactatctgattagcaatcttaattctcctttaccatgttagaataacatattcacagggattgggatgtgggcatattggggaaccattattctctctaccaaatatcctactatctccctttcacaagctgctgctttgcctataaagccaagctcatgaagcccctatcatagctaaaatacaattctagaggaaatttccttctcaaactatgatctcatttttcccttgatcttctcaaaaatactccacgacgtattcactccttagtttcttattctttgtccaccggaacttatctcaaaaaacagtcctcatagctccccgttgctgagtgagtcccttggccacttccctgctcagctcttctatgttctttgacctgtggatctccccctccctgaagccgtccccttcttctctttctggtattcctcttacctgtctgcttctgagtctccttttctcccttctcttcttcctcctgtccctggaaggcttagtcaattcatcatccaagacaatctcatcttctcccaccattgtaattctgaacctggtgctgcggattcccagatcttgctctgacttcttttctgaacccccagtctgaatttcttattgcctcccctgggtatttccaaatgaaaagacccttgggtacatgttgtgtaccctacacagcttgtttaacctggtttgttattagcccccacttcctccacatgagccctcttaaagcctgtcaccttggtggtccaggctagaaatccccaccgtttctggcttctttattcccatcctttttttccctagtctgccacagcccacaggtttaggcctattgtccaggtgcccccaaagtgatggcgggggcaggtcggggggaaacaagaatattattggggtataggaataaagcaaaatgaactttgtttttatcttaaccttttatagtctgtttttgctttaaaatatgcatatgtgcattaatattagtatatgtaattgattagtaagtaatatataggttgggggtacatgctcctaaattttctatttacatggttaagactgtcgggcaagtatgggttttccagtttgttttagccaaagaacccttttacttacttacttattgattggagacaaagtctcacttctgtcacccaggctggagtgcagtggtgcagtctcagctcactgcagccttgaccttccgggctcaggtaatcctcccatctcagcctcttgagtagctgggactacaggtgcatgccaccacacctgaatttttttgtgtgtggagacggggtgttgccatgttatctgggctcaagggatccgcctacctcagcctcccaaagtgctgggattataggcgtgagccactgtgcctggccagaaccctttctttaagtgaaatcttaattaaaacataaatcaaaagcagagccattctggttggaaagaagatggggcctctagccctttttgttcactgtaatggaggctcctgaggtgctttccggatgtacgttttgaaaaccatgggtttagacagttgatatagttccggtctgattaagtctatggtcatgtaagtcttcatggacatcagtaggaaaaggtccctgatatcctcactccaccataytcctccatactgctgcagcatccttactcacgtaagcacagatcacatcttctttgcttctctacaccttcttcttttcctgggcaggcctttgcacacagtaggtgcccagtgaatatttgttgaatgaatggcaaatggatggcaaaacttgttggcaaaatgtatgtttggaagagcaggttctgtttttcctggacatggcctgttcagaagttgttttctcttggcattccaactgtggtccttaactcctggggctctgtgtagttgcacatggagtctgtaggcccagggtgtgttctctgaagtagcactgcagcatttatggcattggtttttgtcacagttgcaaagtggccctctttcaggcctcatttccttgcttaatggattttgctaaccctgcatctcctgatgtcagtataaccaagttttaaatacgttgrttagaaagaaacccttctgtagtgtttctgagtcaatcctgtacatttaaatctaattacatttgctctgacattatgtaaatgcagtcttaaatcaacctttccctttgcaagccaggccagagtttcagatgcactttctgtcctggctgatgttctcccctggagaagcagcagctawctgaggaatgaacagtatctgctagcgcgaagtcttggcagtgtataaggagaaggtggcctattttacttttaataggtcagctgctgctcacccctttgggtgtcccctagacactcctgggtggcccagctgcctggcacattgtaacaggtactgttgacctactgggccaaggaaaggggcacctaggctccttgggggctctctcacttgggccaccttggtagtctcatagcagtgagcttaagggaccgggcaagcctctctcagagctggagcaggcttgtttttggtacactggtttcaggctgctcctaagaaggccaagaactacacttgggttttgccctaaatttacataatcctggttcagactagtttggtacgtggtattgtcatttggctttttctaagataggtattttctgtttggtattatatgtctttttgtttctctgtgcccctctctttcctttggttttcattgtaagggtgacttgtgctgtgtctcaagtggagacaagaccaatttaatttcttgtggtttgcccaggttgcagatgaatacatgttttccctagaagagaataagaagtccaagggacgccgtcagcctttaagcaagctcccccgccatcacccacttgtgctgcaggagtgtgtcagtgatgatggtaagtgttgttttttcttcaccaggaggaaagcagctcaccacattagacttgacaggacaggacatcagaaggccaagctgagggataagggtgggcctgtggcttagctgctcttccagatattccataaagagaggaccggatttccttatatctaattgactaaccagattccattataagtttgagtatcttgcagtgtaccttaataggggataattgcaggcaggttttttcctttcttttcctgggaggtacaaggctgatttttcaggacagaaaatcctgtcagtgatgcaaagccctgtggtgtatatgtggctgcaaagataactaagatatgtccgtgccctcaagacactcacagggtggtggggaaactggacaggtaaacagatctcaagaaagaagaggtggccgggtgtggtggctcatgcctgtaatcccagcactttggaaagccaaggtgggcggatcatgaggtcaggagatcgagaccatcctggctaacacgtgaaaccccatctctactaaaactacaaaaaagtagccgggtgtcatggcacgcgcctgtagtcccagctactcaggaggctgaagcaggagaattgctcgaacccaggaggcagaggttgcagtgagccgagatggtgccactgcactccagcctgggcgacagagcgagatgccatctcaaaaaaaaacagaagaggtgttactctggggcagaaggacagcatgctatggagaagaggagcaggaggctgtagtcagaggaactacagtcagctcagtgtggctggagctggagggcaaggccagggagtgataggtggagtaggaggagggggaccagatcctggatagcgttatcatggaggccagagtgaggactttgtcttactggcattcaggagccagtgacatgttttaagcagaggaatgacagagtcatttagattcctttagaaaagatcgctcctagtgctggcatcttgaggatggctttgagaggaccacataggcttccgtaatggtctgcctgcaatatgaaggtctgaagtaggatggtggtggtagggaatatatttggaagataaaatcaactggatttggtgactggctgtgaagctatgaggatggtagttgaggaggatgagttgagtgcctccccggtttgtagctttggttggggaaacctgagttcagtgtctatggaggatgtagacttaggagttggcactgaggtgacattggatacaattgttggaataatgaggccgatcttggggaggggaccaaggggggtgagcagacgctggggctaggtggacagaggagggaggggagcctgtgaaggaggcagagaagcagggtaagcagccatgtgtaaggaaaaccaggaaatgtggcactgaagctcagggtgtgttgacatcagtggagcatggtctccttggctgcctgaagcccagagatccaggatgatcatcactgccgagcctcagctccagcttggttggtgactgggccctgkcaccttcagggagagcagagtcaatcgtacatgttactcttgactaacatcaggccctgtcctacctggtcctctccttcctgatctgatgtcagtgccccatctctgctgtttttttttttcagtagaaagatcatggtatagccgggcgtggtggctcacacctgtaatctcagcactttgggaggccgaggcgggtggatcacaaggtcaggagatcgagaccatcctggctaacatggtgaaacaccatctctactaaaaatacaaaaaattagctgggcatggtggtgagcgcctgtagtcccagctactcgggaggctgaggcaggagaatggcatgaacccaggaggcagaatttgcagtgagctgagaccatgccactgcactccagcctgggcgacagcgagtctctgtctcaacaacaacaacaacaaaaaagatcatgataaacagggtggggaatatcccttctgtcctccagtcagaagtgtggcaggaccctgagtcaggtcctaggaagttctctgtgttcttattccagctcagacaggagcttcaggttctctgggtagcacctgcctatctccctgattggtttaaagcaatatagacttcaggaaactggaaaagttaccaagaggaatacaaaattacccttaaaagatgaccattttgaatatattaacatattatcttcctggcttttctctagtcagatattagagtatgtccatgtatatctttttaaaataatgcagttgagataatacacaacctctccccctacttttttttgtttcttggtttttttttttttttttttttgagaaggagtctcacttactctgttgcccaggctggagtgcagtggtgtgatcttggcttactgcaacctctgcctcctggtctcgaactcctgaccttgtgatccacccacctcggcctcccaaagtgctgggattacaggcgtgagccaccacgcccagcctttttttttttttttgagacggagtcttactcactctgttgcccaggctggagtgcagtggcatgatcttggctcactgcaacctctgcctcctgggttcaagtgattctcctgcctcagcctcccgagtagctaggattacaggtgtgtgctacgacgcccagctaatttttgtatctttartagagacggggtttcaccatgttggccaggcttgtctcgaactcctgacctcaagtgatctgcccgcttcagcctcccaaagtgctgggattacaggcrtgagccaccgcacccagccccacaatatcctttaatcttcagtccatgcccatctttccctgcatgtcccaagaatgtgttttatagttatttcttttgaactctaatataaatcaaactaaggtcacatactgtatttggaagttatgtttctttactgttgtatgcccctccccctacttttaaaaaaatttcaattcaagcataacaattcagtgatatgcacacattttaactgtacagctcaatgaaawtttacatatgtaaactgtataattttgcttcctgcaattttcacttaacgtagtgaacattttccctcatcattcagtattcacaaatggaatgatctggggccacttttggctttgtaaatggaacagatgtcagtgtgttaattttttagttgtgagtgtgagcctgcctrtctgtttctgtttcttccattctatcttggtcactcctgtttggccaggataaagaaaaaaatctgtgcttgggttctgggcaccatggctcctgattacaactgaacgatggggcatataggggttgattttaattgtctgcgttggtgtccttagggtacactgaggcggcgcacaatggcagctgccagatgccttcagattaaacatgactatgagggcagcgtagaatactatctgcactgagctggagttgccagaaatgaagaaacaggcacctaatggaagtacagaccagagctttccttggctgcttggaacaggtttcaggggcctttgggaaagcacctctgtttgggaagaaggagggtcatagctggggactgatgatgccattcaaagcgagatgcatggatcccctgggatgccccgtgtgatggggctggcagagagccagtctcctgtcaggggccgcatacttgggccttgcttggtcacacttgccaaagaaaggcatagcaactctagcttcatacctccctcacatggtagagcatctggagaaacattttggacatctaccaaagactgcgctcatttacttataccttcagaattatggcgtttcctttacttccctgtttctgtttccttgtttctgctgggagcttgtggactatgcccctgtttcactgatttaggaagaactgggaagtgtgcacctttatcacttacatgagttttgtgagcaaactttttttgttttccactcagcagtatgtcccctttcttgtaggaagatgcacccagaggggatttttccttcccaggccttagtgaagtctgatgagttgtatgccctgctgtctagcatacctaggagacaccatctgtcatgaccagggatatataaagggccaggaagtcagtattttaggctttacagtcttcattggtctctgtggttgtcactgttttttttttttaagccccaatgctgaaaatgtaaaaacaaagctgggtgcagtggctcatgcctgtagtccaagctacttgggcagctgtgatgggaggatcacttgagcccaggagtttgaggctgtggtgagctatgatcgcacatgtaaatagccactgtactccagcctgggcaacatagcaagaccccatcataaaaatgtaaaaacaattcttagcttcctcagtgggctggattcagcctgcaggatattgtttgccagcgtcaggcatcacatcttgtggctgggaagaggattcatcttggacatgtagctctgctctaggaggggttggggagccttgtccagaataggtacatactgctgacctttccagaggaagctggtaagtcctggccaaggaccatgatattacaacttttaagctttgccaattccctgttattttccttccttgtttagttgcactaaagggaaaactctaaaaggtaaaggacttaacaggctgacgttttggaggcagcaaataagatggtttttggcaagatggtgcttcattctgctgtccttgggcagaagggctgaatgtggcagctgttaagggagagtagagcaagctgagctcgtggggcaggaggaagaatggaggccatgagtcagtctggccagagaatggggtactggcaggactccctacacatcatcaagatactgaaggagtctattgacagttgcttccaccctttgcctttatcatccttaggaattcaggagtcacccttsgtccaaacctaggatcaggagtcctagtggaactcatctgttctccaggcagagccacagatgtgcagggttagtgctgactcacacttctgtttcctcctctagagacatctgaacagctgacccctgaggaagaggctgaggagacagaggcctgggccaagcctctgagccaactgtggcagaaccgacctccaaactttgaggctgagaaggaattcaatgagaccatggcccaacaggcccctcactgcgctgtctgtatgatcttccagacttatcatcaggtaacccagctccatgcactctgtttacccaggaccagcaatcatagggaagctagatttaattgtgagtatatagcttgtcactggttgtcttgggaaaggccacctccacccccagcattctctgccccatctgtgtattggtcagtcttctccaggcagataacccagcaacgtgggtttcaattgagaatgctttggagatgagctgagggtgggcttaggctcccctttgcacatgcagtcatcacagacatcagtttgcagagcaatctgcatttctgttattctagtccgtggttattcctgccaagtggtttatagtcctggccagggtggagaactgtgatttccttaccacagtctgaacctcagctgaaaagccagatcctctaatgttgtttttcctttcccattgccacaatgcgtgttgccagtagcagaaggaacttgggaggggtggaagcaagggcctgatatgtgaggaggggctgggaagcaagattgctgagctcagctgtgtgcctcctgctctggggcatctgtggcttcattggtggatctctttgggtccagctctaggatgccaggaaggcattcacagcagcaggtgccargggaccagctcagtctcagctgggacctgcacagcatagcaggtaggtaagtggtccttacctgctgtggtggttaaagtggcatggctgccgctgagcctggcagggccccagattcatgcttgctgaaaatggaacctcagaccaacacactttggattaggaactcactaaacctttccattgacaaaaagcaaaaccaaagcctttgcctatgaggggagtgaatggctgggttcttactataagcagatctactaagtaggagtttcacaaatggcataggctctggggttgacatctttctgggcctcatccttggaatggagatgcaggtgccatccagcagatatttgcaatcagtatagtttgccaagggaagtatgtggatttaagttcttcctggagggaccctgagccaggaatcacacaggtggggctccagccatgtgacagtgctgcagttcaggtgacctgctgacaggcacaagaggcaattagtgctggcctactaggagcatctgctctgggtacactcctgaggtggggtcaccgcacagtgtagcacgtaagggagcccacagtagcagcctagctgctaacatctccgtgcattttttttttttttagacggagtctcagtctgttgcccaggctggagtgcagctgggactacaggcacacaccatcacacccagctaatttttggattcttagtacagacggggtttcaccatgttggctaggctggtcttggactcctgacctctggtgatccacccgcctcggcctcccgaagtgctggaattacaggcgtgagccacctcacctggcctctcagtgcattttattaaccactttctttgggaagattgaaatcccagttgcctcttaccttgctcccttttctcagttgtcccctaggggcctttgtatgatgctgctgtgagaaactgaatttgagtcattacaggtaacttcaattagcagctccgggataatggctgtgcacccgggagctgtagccatagtcagatcggtaagagagccagctttctgctgatagagcaggtggaaagctaagagcataggcacgtgctcactgaggtgtacacttgttctttccccttaggttgaatttggaggctttaatcagaactgtggaaatgcttcagatttagccccccagaagcagaggaccaagccattgattccagaaatgtgcttcacttcgactggctgcagcacggacatcaacctttctactccttatcttgaggaggatggcaccagcatactygtttcctgcaagaagtgcagcgtccgggtccatgccagtgagtgctgctcacctttctctgtgtcctgtcccaggagtatgggcctgctcactggaagttcttgccacctcctggcctcccagccccaaaaagattgttgatgttttattggggagtctgttgctagctgatttttcactgtctccaggggtccatactggcactagtcatctctttgccatcctcttggttgcagatagcagaaagggattagtccctgccacttactaggtgtttgtaccagtgaatctacagtttttgactttttgagactttgagccatactgtatgcctgagccctggggactcagactaaagaaaactaaggggtttctgtgagatttggttgtagctttgggaggtggtatatggaaaggaattgcaaatctaccttttgactctgaccactgggtttaatttgctcatcttggtgtccctgttaggttgctatggggtcccccctgcaaaggcttctgaagactggatgtgttctcggtgttcagccaatgccctagaggaggtgagtgatcccacactgttactgtcttcaccatgagtcttggtgcatattcagggccagacgatttcatgttggactcagtattcccagcagtctgcatagggtctggtacgcggtgatgtcagagagcgagtattgtgagagtaaatcctatgaccgtgagaatggttgctgcccacttacggagtctggatgctgtgtttgctccattgtggaaagaccaactagtggtcttcctgtggaggaacaataactcccttaaaagaatttagccattttgaattggagcctcagaaaggggctcagatgattcattgtgctgttttctcttcactgtaccccctggaacctggctgtacctagcccatataagaagcagtcagagccctgtcatgcctctagtttgagcaaagtatcttttgtgactttgctaagagttgttattagcagcaacaatgaagaggattatgtgaagtcacgtgactacttggcacactttagccctgagtggcctctccttctgacagggcgtcctggtgcaggggctgcctgggtgaagccccacatgctattatgcttctttcttatgtggaggagttgcccaaagcaggtccaggggagagcagattgaatgttaatgacttggtattaacyactttttcctccctctcctttcttggcaggactgctgtttatgctcattacgaggaggggccctgcagagagcaaatgatgacaggtaagtttyctgagcagtgccttggaatgcacaggctcagttccgaagcacacagtgtctttgtgagggtactagctgttcttctgaatgactgatgaggatttgggaagcacatcgtgtggagcaggaatagcatctccaagactsattttaaaaatggaatgctaagggagccaagcagtcccagactttccaactccagctgctcctctgcagcagagatgtcagtgacatcctcctttggagaagctaagaatggactcatgagaatatgaagacgaagatgatgcgcagggactgtgtgggctggagtgaggacattcaccttgtcacagctggggctggtatgcagaggcggccacaggctagcaagcacttctccacatggcaaactccctggctcagacctgctgtttggaatgaggcgagtgtgctcaaggaggacactgaggagagctcagacaggcccacccactatggaaccgaatctgctgaattttctgggcttctcagctgttgggcagctcgttttcatggagtgaatctttgtgcttaggcttgtgtttggttgctctgaggtggaaacgtaagatgaatgaggtttctgacctggaagagctagctgtctagggcatggtgcgtgcaggtcagtgctgagtatcctgcttccaagtagaatcccgtggcaacttgcagcatatgttcagtccagccgcctgccctcaagagtcccagttatgctgtccctgagagatagctactctgcctgctgcttctgctccttcaaaggcacttgctgccattatttgaggtcactgggttcctcacagtcacaggatagtgctgggaacattctttcttatttggagtggaaatggctgtgcttgaatctctcacctttacctctgaatgcctgttctgccctccagggccacacagaacaaatctgttcccactctaaaaagacagccccactagaactgcagagagcttccatggagccccagtgttgtctggtgtaggttttcacgtagcatggttttaagagttgtcaccattttcgttcttctcctcttgatgcatgctggtttcccaaaatgtccaaaacttactttaattcttaaggatgtccgttgaatagacctctcagagtaagtggggcttgggtcagaccttaaagattaaagagtgagtcagctatggaaaaagggagcagaagggagaggtcatttcagcctgggggagaggtttgggcagaggccgagagagagctgtgattactggcagattagggcacagccggggacgttttcaggaagcacttgggtcctatggtaaagaggtctgcatagagctttccagtttattctcactccctgagacctgccacacaccattagcctgcagctctgttcatttttcaacagagtggtgtaagaagcatgatccggtgctaacctagggcagtgggcagtggcctaggtgggcagtgggggtggcactgcttccacatactcagaggagagayggttctggttctcaccttcctgggtcccaggcatgtgctggtggaagtcagtggtcacccaggtgagggaggaagcgctgtcagcaggcccaaaagagaaggccacagagccttgggcccagaggtgactgagggagcctttgccttttggcaggtgggtccacgtttcatgtgctgtggcaattctggaagcaaggtttgtcaacattgcagaaagaagtccggtggatgtgagcaaaatccccctgccccgcttcaaactggtaagggcttgtagactctacataatttcccgacttacaagtttctgggtagaagagaacagggacctcctgtaccccttggttttggttagagtttgtgattctcactctgtggttagattccttagtggaggccaggtgtggtggctcacacctgtaatcccagccctttgtggggccgaggtgggtgaaccacttgaggtcaggagttcaagaccagcctgggcaacatggtgaaaccccgactctactaaaaatataaaattagctgggagtggtggtgcrcacctataatcccagctcctcgggaatctgaggcaggagaatcacttgaacccgggaggcggaggttgcagtgagccgatattgtgtcactgcactccagcctgggtgacagagcaagactccgtctcaaaaaaaaaaaaaaaaaaatttccttggcagataaagttgtaaccagacctggattagagcaggctggtgtgtccttgtattttgggaaggggctggctcttgcttgcttggctttgcatttgggaggggaacaacagaggaagctgcagtgccagttcctgcaatcactggttttcttcccctgtgctacagaaatgtatcttctgtaagaagcggaggaaaagaactgctggctgctgtgtgcagtgttctcacggccgctgcccaactgccttccatgtgagctgcgcccaggctgccggtgtgatgatgcagcctgacgactggccttttgtggtmttcattacctgctttcggcacaagattcctaatttggaggtgagagagggtgtcattctagaatcctcttgacagttttcatggtcattttctctgcatgttttccatttgttgtatcagcaactatttcctcaagcattctgcattatgaagagtgctaatgagttaagagattgagaggtggcccctgtccatctccactccctgccttgtactccataagccagtgacaccaaactgcttgtagttgattcgttttgattatctctttacttgtctgcctctccatcagaataaactccttgagggtccatatcttattaatgtggtcatccttattacttaacctagtgtccgggacatgcagaacctctgaaaatgttgagaacaaatggggagagctcccaagagttaaccatgaattgccagacagtagagatttctgcagttctcttaatggtaaagcttagagaaaaagtgacatgtaatgttagctagaggagctctgaagaggattgggtagacggtggcatttgaagtgggtcttaaacaataagaaggaattgtatgcagagactgttgtgtgcagagcttgagaaacagaatgaacaggtcgcagaagaaggatcatgaaagactggttatgggagtgtgacggtgtgtgggagtgtgatgcttgagaggcggacaacggcagaggatgaaggccctgcactgccactctcaggactctgacctgtcttcactggatgagaacttgttgaatattttgattctgcattatagtttttgataatcactcaggtggttgtttgaagagaggattcagagtaagaatttgaggctggaaaaccagttagtccaggagagagtgaggtctgaaatgggaacacataggcagggctttggggtacatttaactttgagatcctccaacaggtagaactgatagggtttattgaccctcgtgggttgaggagagaaggggagaggaggaggaaagggggagtgaatattgaagatgactcaggttactcccttgagagatgggaaggatgctaatatgatgttagtaactgcaatcaggaactgagatgaagcagtgttgctctgcaagggagagaaggagggatgagaaagaggaaagtaaatgctgaggtcactggagcattctggagagtaactgtgagggtaaagatttggctattagcatttaacagcatagttaaatctagttcccattagaaactgggctctggagattcccagtgggagaagcaggtagcagagcatgaaccagtgaaagcagttgagaaagtgaagcaagccagtgggaggaaggagggtcatatccaacagagaaggcagggctggtgtggtggtcactaagtaccacaaactggagtgtccctgtggagtagtcaggtcagaagccagaccgtagttggggaagrctctgccatgagtgagttacaatctaatagaagaggcgatcatacaagtttgacaacagtgtggtaaatacataatcaaaggaagaacgtgatagatggccagcccagaaggatgaacttttcactctgccatttggggttgcagaaaagtcctggttggctgactgcattctttttcataaagatgttgaacgtgacaggtggtcaggggtatgataggaaggaccttaggaagatgggaacatattgtatgtgagaatgagactccggagtgtctcaagggccctgccctagccatccctggtgccctcaccatgcccttctcattctgaacttgcccttaatgcaagtaaaaacttgaggtagtactgagtcacagctatgatagggaagagttttttcatacacagaatagttattttgtgataatcattaatactccacatgcttaagctggcagctgtagactgctggtgctatgaggaaattggggggactgatgagttagtagttttttcactgatttattcttcaaatgtttattgagcatttactatatgccaggcacagttttaggtgccaggactataccattgaacaagacaaaaaagtccttgcccttctggtgcatacagtatagttgaaggacacatagaagcaagtaaatacacagtatagcagatggtgagaagtgcagggataaaaattaagtcagataaggggaatggaagatgaagtagtaaggaatgacatcaataagttgacactgggatgggagtcagtgtgcaagtaactggggaatggcatctcaggtagaagaaccagcagtgtcgaagccctgggtggcagcacatatggcacactcattcagggaacagcaaggggggccagcatggctggggcagagtgcctgggcaggctagcagrcgtgcttggaaatgaggccgtcacatactttgtgatcctgtttgcatcaagggcaagttcagaatgagaagggcatggttgagggcaccagagatggcaatggcagggcccttggaatgggggacagtttgttgtgtgtagctggagacatctgggaaacctaagtctttgtgccctagccctgagggtaatgctgcaggtgctaagatgtggtgcagctttgcctggcggcccaggcctcagggcacctattgagtctctccttcgatactttgatgtcagttcttggcaagatcagaggtccatgttgttgttcagagagttctgggtaagataatatggtataagggccagttgtggactagctaaatttatgggaagagctaaatttatggaggaaatgtggtactggtctcttccaatgtcctggctgggatggtgggtatctggaaaggcttgttttarctcccatctcttctctcctttttacttttactttcccatgcttatctttccctgataaggaggaactaattgatcttcatctccatatgccaggcctgcaaactccacgtgtgagtaaccaaagcctctgtttttttccagcgtgccaagggggccttgcaaagcatcactgcaggccagaaagtcattagcaagcataagaacgggcgcttctaccagtgtgaagtggtcaggctcaccaccgagaccttctatgaagtcaactttgatgatggctccttcagcgacaatctttatcctgaggacatagtggtaatatctgcaaggagcttctcaggcagtttggaatggggggatgtttctaaggtctggctggcagactgtgtgtgtatgcctgcttcttctagccaggtccctggtcccatcaccatgtcctcaaacagaaagaatcatctgtaccagtctttctttgcaaagaaaactgcgtgctgctagggtaccctattttccctakaagtacctgggaatcagtattttctgcaattccttgaaacctgcatctgttgccgtctaaattatccttgagggcattctagtgcaataggagagcccaggctttggaatcaaatatgccaataccagcttcattgcctagtagctgtgtgattttaggggaattatccaactctcttttctatcaggccctcttagtagatgtatagaatctgcttttgtctcttcacagtgggctttagggctaagtagaaactgcctggagacacccttggcctgtttatgttatcaacacctgagacacagtggccccacatggacccagtcctaggtctggcttggtagtgaggacttagttcaggtttcccctacccccaccttgccttttcagttggtagactgaccaccaaagtagagaggaatgaaaccattttttcctttaacaaatcaggtattgtcccatgtttataccacattagccactcagttgctaaaagcacattcattagttataaggtagacttatagaaaaggcgacattagtagtactcatagcagtagcatagctatcatttatttatattttatttgtgagacagggtttcactctgacgcccaggctggagtgcagtggcacaatctcagctcactgcagcctcaacttcctggattgaggtgatcatcccacctcagcctccctggtagctgggactacaggaacgcaccaccacagccggctaattttttaattttttgtagagacgggcttttgccatgttgcccaggctggtctcaaactcctgggctcaagtgatctgcctaccttggcctcccaaagtggtgggattacaggcgtgagccactgtgcctggccttatttttttttttttttttttgagagagaccaggtctcactctgtcacttaggctggagtgcagtggctgtatcatagctcctgcaatctcaaactcctgaactcaagtgatcctcctgcttcagcttcccaggtagctgggactacaggcacatgcagtcacacctggctaatttttaaattttttgtagtaacaacggtcttgctttgttgctcaggctggtttcgatctcgcagcttgaagcgatcctcacatcttgggcccccaaaccactgggattacaagagtttgagccaccatacctggcccttgctgtaatttattaagctggtacagtatgccaggcactatgctaagtggttatttcaagtatctctttatcttctcatacccactgtgagaaggatgtggtattatctctaacttacagtggtttcaggactccattttctacaagttagagaccccaaagagcctgtgtttctctgggttacatctaaacgtatttattcttattagaaattaaagcagattgatttaaaataatcaatttttttagattaaaaataacttttctaaaacaaaaacaaaagattgccatttccctgcaattttgcaaatctctttaatgtcttttttttttttttttgagatggagtcttgctctgttgcccaggctggagtacgggagtacggtggcatgatcttggctcactgcaggcttcacctcccaggttcacgccattctcctgcctcagcctcccgagtagctgggactacaggcgcccgccaccatgcccggctaattttttgtatttttagtagacatggggtttcaccatgttagccaggatggtcttgatctcctgatctcgtgatccgcccgcctcggcctcccaaagtggtgggattacaggcgtgagccaccgcgctggccttaatgtcacttcttgattcaatctattgtgatacactgtttaggttcaagtataggaagaaaattcagccttgcgtagatatgtaattggaaaaaggagtttgtttttgtttttttaaaatagggtttcactccagtcacccacgttggagtgcagtgcagtgatctcaactcactgcaacctccacataccaggctcaagtgattctgctgcctcagcctcccaagtagctgggactacaggcccttgtcactggcgcccagctaattttttaattttttgtagagatggagttttgccttgttgcccaggctggtctcaaaactgggctcaagcaatccgcctacctcggcctcccaaagtgctgggattacatctgtgagccaccactcccagccaagggaggtattttaatagtctttcaggtaattgtgtttattattctctgatatccaccaaaactcaatggaagtaacaactttttttgtttgtttgtttgttttaagagatgatgtcttgctttgttgaccaagcacctcccgagtagctgggactacaggcatgcatggctatttgtagaaatggggtcttgccatcttgcccaggtagtctcaaactcctgggctcaagcgatttcttttgcctcaacctcccaaagtgctgggattacaggtgtgagccactgctcctggcaggttcttaaaagttagttgcagtgtggaatctgaaaggtcagtgaacgtttcatactgttaacactaaaacccattggtctcttctgaatggatctttcacccatgcatccttttataacatcatactttggtcatttagaaaatattggtgcactggcctatcgacagcctccaaatgttgttaaatattattataaatttaatttttttttttttttgagacagagtctcgctctgtcgccaggctggagtgcagtggtgcgttcttggctcactgcaacctccacctaccgggttcaagcgattctcctgcctcagcatcccaagtagctgcgactacaggtgcacgccaccacgcccaactaatttttgtatttttagtagagagggtttccccatgttgtccaggatggactcaatctcttgacctcgtgatctgcccgccttggcctcccaaagtgctgggattacaggcatgagccaccacgcccggccataaatattttaaaaattacatttgttagtatcactaataatcaaaaaacttggaattttgggaagtttcaagctcacagttgtgaatgccgcttctctgaaatgctaatatttgtttgaaagcctgaattttactattggcaacagatactgacttttgttttccttgacatgacaggcgttcacttcatgcattttcargaagatgtctgccagatacctaagtctgaaaagccatagtttgtcagtcacttttttctttttttaaattttcatagagttttttaaagacagggtcctgctctgttgcgcagcaccactgctggagtgcagtggcatggtcatggctcactgcagcctcatcctcccggcctcaagcagtcctcagccttccgagtaactgggactataggcgtgtgccatcacacctggataattttttatgttttgtagagatggggtctcccctgtgttgcccaggctggtcttgaactcctgggctgatgcgatcctcctacctctgcctcccaaagtgagggattacaggcatgagccaccatgcctggcctagtaatttttttcaaataaaactggtattccatgaacaaagcagctagtgtaattcacaactcaaacaacacagatagatttctttgagacaaccaaaagtgtcttatgaggacttaacacatgtactcaatgattaagatttaacaacattaataattttttactgcttcatcaagggatattgttacatgcaatctagagtttttgctcttttctcctaaattatgagtgtacagtggtgaaaaatgcaataacaactagtagagcttagggtcagtgccttgatctgtgctcaggtgccagcagttgtacctatcctaggtaaatgacaacacagtgacaaaggctaatagtttaatattataaaaatagccatgtctcacttgctccctgacagtgtctcaggaacccctcagaggttcacagaccacattttcagaagtgctgttataggaggtggaactgaattgcagagaacttaaacaatttatcaaatatcaaacatttgagtagttaaatcttagaacacctcagatattgggtgtaggaggctgtagtttatgcctaattgttagattgatacaaaatgtatttactgattacctattcagtaaatgaattgtcaataagtagggaactgtttccactcaataaatgaactgtagcatgattgtaagagcagatgtgagcatccacatccttttagactcactgccctgcccctctctcattttttaagccatgtccctaaggaccttctcccaggtatacctatcagacctttcattcagccaatatgctgaatgaaatatccccccgtataccaagccctatgctgggaatacgatgaggacttggggtacttacctgcttctggaaggaataaaagttctgaagtactttgccaggtcccatggtaggtgactctttttcatctttcctgttaagaacatatttcttggttgggcacagtggctcatgcctgtaatcccaccactttggcaagccgaggcaggcagatcacctgaggtaaggagttcgagaccagactggccaacatggtgaaaccccgtctctactaaaaatacaaagattagctgggcatggtggcacgtgcctgttgtcccagctactcgggaggctgaggcaggaggattgctagaacccaggaggctgaggttgcaatgagccaagatcaggccactgtattccagcgtgatctcagctctctgcaagctccgcctcctgggttcacaccattctcctgcctcagactcccgagtagctgggactacaggcgcctgccaccacacctggctaattttttgyatttttagtagagatggggtttcaccatgttagccaggatggtcttgatctcctgacctggtgatctgcctgcctcagcctcccaaagtgctgcgattacaggcatgagccaccgtgcctggccaaaaaaaacacatgtcttatagttgagtatggttctagtatttcttcatggcagagccctggagaacccgcaggggaacagttgagggaatgtaagaaggactcttgattctggcacttaactcctgtgtttactaagtttgttatagctggattttttttttttttttggtcacctagaagcaggagagggcagagataggggcagactttgacttagcaaggtctttaactgttaacatttttcagcccagagagctgccttgctctctaaaacagttactttgtcctggttcactcttccctgagtagaggacagttacctttgtgtgcaggtggacgttcctttcaccctccttccttcctgtttcctcagagccaggactgtctccagtttggtcctcctgctgaaggggaagtggtccaagtgagatggacagacggccaagtctatggagccaagtttgtggcctcccaccctatccaaatgtaccaggtatccaaarttctacctttctagggagtggggggtgcttgattaattctgtgcttcctgttgggccagaggcgagtctttgctcttaggagaactaataggttggtaaccctttcagagctaggggtctgccctgtttccagtctgccaaatgtgaagtaaggtagttgttattttagtgttctaactccttcctttgactgtaggggactgccactgtgcatggtggaccagggaaagagtcagggatatcctagccaaaaggcctttgtttccttggtaggtggagtttgaggatggctcacaacttgtggttaagagagatgatgtatacacactggatgaagagcttcccaagagagtcaaatctagactggtgagtattttctgtgtccccccagttcctgtcttggagggagggaacaagtcaaggatgcatccctttgtattgttcctggggtagctgacacttggcttgcttattcttctatagtcagtagcctcagacatgcgcttcaatgagattttcacagagaaagaggttaagcaagaaaagaaacggcaacgagttatcaactcaagataccgggaagattatattgagcctgcactataccgggccatcatggagtaggtgcttccagggtccaagggattctcagccatccaggcaagagcactctgggttccacagcacagcagacatggaacgctgaagtctctgaaagtgaagttgtaaaaagaaaaggaatgaaataaccgacccatcatcttctcacccaccctcattgcattccgctgtagtgaaaggacgagccatttctgggcacgtggcagcagtcgctgatctcccagctgaggggctgagcactggaatgctgtggctgcactggccccagtccatagagrggtcaactatgctggctggactggctgccttgttcctggcctaggacttagcttcataactatcacctgcaccgactaggctgaggtgctggtacttgccccaacccctacttttgtatttatatgtgtgtgtgtgtgtgcgtgcgtgcgtgcgtgcgtgtatgtttggtctggaccagcttctgccagcccctggcctttactttcttccttgcctatgcagggcaaacaaaatgtgaaattctgccctcagctgagctgagtaagggctcctgggggttggctggagatgggtgtggcatctgtccaggcctggaaccgtctcaagacagtgctggcaaagctgcagtattgagatgctaaggagctgatgccacctctttgtcttcccctaaaggagaacatggggataacatgggtgtgtgcccacaacactctaggtgcagagcccctgtggcaaagtattacagggtgtgggtggggattaccctgaatcggggattttaatgatggaagcaggcagagcctggtgggtgattctgtcaacagaaaattgcaatcatgcaggggctgggagggttaggatgaaaaaactggggccattggaggcccactgtaggtgggagggagctgattttggggtggggggtgggactagagggcaatactgaaggggttaaacaggtttttgctcctcaagaatttgtttgcctgggcccaggattggagggcttcacaccaataccctgtgtatacaagaatcagatttataatacttccccttttwtgttacgtatgaacactataaaccaaattattttgaaaactggtgcatcmccttgtccttagcaataaaatgtgttgagcagaggattggctgtctgccccaaggagcccacgtggcccacgtcaggctggggggtgtatctagagtcataggctctggagcggggctgtgtattttaagacaaatcagtaaggcattccctaggaagttccagagagtgggtcctttgcttgtcaagctctgtattaggccaagtatggtgggtcatgggagcagggacacttctggctctgagcacctctttgttgtgcttgctctgccttagagacgggcaagatgaggtaacagaggaagcaccagaccaatgagtcctctcaacagagtatctctcactgctgccccatttgatacatctttgttgaactggcctaagttcatgccagcatctgtgctctatacaaattgtggaaccagtgggaaggatgggtgcattttaggtgcttgaaaagcaagggactcaacctccagtgggatcctcagattgctctccgagctgtctagttggtgagaagcttccctggaggaagacccaatctcctttggctggtagatccctgaggtcaaagtggacaaggatggggaaccacagagcagggaggggggcaatgaataggtgcaggacttgggtgccccggagctgcaccggctggcccttaaacagccaggcacttcctgtggcatggccctgtccaggtgcaggagaggcttaggtcagttcagctgctctggatgcttccttgtgtccctgggggttgagaggtggttgctacttggtatctcattgtggagaaagggaggtgcaggaggtgatcttttctatgtcagctccctcctggggcccagggagggaagttggcctttttttttctttgcccacactccacttggggattcccaggggatgtagcaagggaggctgggcagaaccaggccttagtggattggtgagagaacactaatccatacatctttggaagagaggaacacttcaccagcctttttacacaggatccctacctttctcgatgaccccactgcctccaggggtgggcgctgggtttaatcccagcagtttttactcaacagctgaccagttttccagaaactgcactttttttttttggtcaacctaataactcttaggaaactgcaactcaggtgatccaaatcacacagaccggcccgttctctcccctactggctgcctatgcagtcgggtcgacctcaagagaactggccccagccaaaagcggcacctcccggcctgccagtcccttcctgccttaggcagctcctcccagaagcctttttgtagggcaaactgccttccctttgtaaggtagggcctttggatccaaggttgcagtttaaagaccaccccgactttgttgaggaattaagttttaaattccgccccaggcggataacaccagggctcagccgcaggaatgaaaaaggagtgggagggctgcaaagtgtacgtggggcttggaggccttgtgccacgcgcggactaaaaatgttctacgagtctcttaacgctcacccccgtgcccccttacccaccagggcccacggaggtccgaagctttcggcctcagtgagcggaatgggtgcgctcacgacctggagggcgagatgagatgtccctcggcgtgaagtggccgtgactaccctagcactttgcgttccccgcgcgggcgacgaaacacgctctcgaggggagagagccgtgcgtcctctgggccgtgaagccaggggaagagggttcctctagacagctcgatgtgcccgggagagacacccacgctgaacctgcaagctggggtgctccaccagcgcgaacctctcgccccgcactcgccgcagcactgctctcgtggtaggcggggtgggcgggacggcaaatccgcggctcctgcgtctattgggctgctcggggcagcgcagctccgcattggccaggccctcgctccgcccggcttccgcgagcccattggtcgcaggcgcccgaccgggtcgcggccgcgcgctccgcccgccgctgcgtccccactatggcggcgcccatgcagcccagcgcgttgtgggctcccgccggggtcccccgcggctgtcgccgccgcctacgccgctgcctccgccttcctgccccgcgtcgggccgggcgccacctcccccctgcctccctctccgctgtggtaagggcctgcccagtgcgcttcggggcgcgatggctgaccgcgaataacggtcgccgctccgccccgcccctcccccgccggccgcgggtcccgggctgggcggggcgcggagcccgcgcgctagtgcccgggaaggcggggtcggggcacggcccagtcgtccttcgggctgggggcccagtacctggatgacctctcctgggtgggggccgccgagcctgggggaaaggccggccggacgcaggccaggaggtctgagatcatctccgtgtgaaaccccgcagcgctgcgcaccttggcgcagagcacggacaccgtcattcgggccctgctgtgggaaaaggaaagaaaagtccagggagcgcctgagcgggaatcggcagcgtttgggtagcggttgtcattgcttactgctctagcgggggccagaactggggtcagtttgatcggcaaagtacgcctctcttgcttcctttccttctggcactttcccccgttgtgtcctcggtgcttttgcttgcaagagaaaatatcttagtgaggagggcaggtttggttaggagagtgtcccatgaacattttggattcctttttacaacaatgtccatttttatgattcctcagtaagcctcatttatgtttccttcacgtatgaggaaggagtgaaacctgataactgaatgtaattaattgagggaaggaccagtgaaggcggctattacctcagaaagtaaaatactcaaacttttcagtggatgtactgtgaattatagatagctggacattaaggtaggaaaaaactcttattaggttactaaaagtaagatagtccccatgacaaattaggttgtttctaaggcagaattatcttgtagagatgatcactgaaatgtttggtgtactttcaagtcaacagaggattaaaaggaagctggcacagaaatttatagccaaatgatactttcaaataatctcttaaggcaatacagctcctcctatgattagagattcttaaggatattttgagatattaagtggtgaatctctccatttcgcgtgtctaactgtctaaccatggtttaataaaaataaaatgttaacgatgaaacaagacattcatgttctcagagactaacagactttgtatcaatcaatggaacgcctcttgagtacatattttatgcaaggcattgactgaggggaaactcaaaaccatttaagataagaaacttgctctaatgggcctataatatacttgagggaataaagcacacacatgacaatgataactgtgatatggtctctagaattccaagatggtaggtactctgagaaaccgagaaaaggagaaatccatgtgtttgaggaaggtttcacagggaagctgaggcttgaattgggtcatgaagagtgggtagccggctggatgaaggggaagaagtgagcagatgagaaagtgaggatgacaaaggtgcaggggaacctgagatgctcatgggtggttccagggggtttcttagcagaaaaagcaggatatgaggttgcacaaaaggtaggttgatggcattaatccaagaggtacctttgtcctgtgtggtgcaaagagtaaacaagtaatagaatttacttcaaaggaagctgtagctaactatcaggaatacagtaacactttacttgtcattgtcactttttcttttttcttttttttttgagacagggtctccctctgtcacccatgctggagtgcagtgaatgtggctctctgcagccttgactttctggactcaggcgatcctcccacctcagcttcccaagtagctgggaccacaggcaggtgacctggagaattaaaaaaaattttttttgtagagacagggtcttgtcatgttgcccaggctgttcttgaactcctgggctcaagaaatcttcccaccttgagttcgagaccagcctagccaacatgatgaaaccccgtctctaccaaaaaaaaaatacaaaaaattagccaggcgtggtggcaggcgcctgtaatcccagctgctcgggaggctgaggcaggagaatcgcttgaacccgggaggtggaggttgcaatgagccgagatcgcgccagtgcactccagactgggcaacaagcgtgaaactcggtcaaaaaaaagaaagaaagaaatcctccacctcagcctcccaaagtgttgagaatatatgcgtgagccaccacacctagcccattgtcgcttttctgattcacctcagctacttggaataacagttctctcaacccagaagcggcacctcaagtttattcttacttttcttctttttttctccccgtgtttttggttgggtgccaggtcttgttgaccctacttccacactgtttctggcatctgcttctatttttgagtcagagcctccctctgttgcccaggctggagtgcagtggccccatctcagcccactgcaacctccaccacctgggttaaagtaattctcccgtctcagcctcctgagtagctgggacgacaggcgtgtgccaccacacccggctaatttttgtatttttaatagagacggggtttcaccatgttggccaggctgatcttgaactcctgatctcaagtgatctgcccaccttagcctcccaaagtgctgggattataggcatgagccaccatacctagcctggcatctgcttcttttcactcctactgtcatcacactgatctggggccattggaccattcctgtgaattaccacagaaaccccctaacatttttttccttccatccatcatgtgtattgccatcacttccaagtttgtcacttctccagccaggactttgaatggctccccattatctgttgcgttaggcacagaccagcctggcatgggcaatatgggcaaactgatttcttgccattctgttatattttccaggtcaatggaactatttgctctttgtgctttgctgtttgtgctctgtatctttgctcatgttggctttttctatcttaaatagtctccttgactttaattgttcttacgtatgtttcagggccatttgatacggaacttcctttgtgaagcttatctgtactttttcttcccatctagatgagctgtctctcttctttaagtttaaaccaccataacattagagtctgcctttttgcgataattgccttaaatcctgcttctacccacagtataagactgaagctatttcaagacatagactgtcctcttcatcatccaactttgtacatagtaggtacttggcaaatatattttatattgaaaatagctttgaatcaggatggatgcagagataattctttatccaaacaaaatgtttatcattaaaatctataaataaagttgtttatgtgagagaatcccttactgagagatctgtattgacatagatagcttggattaggctgcactaacaaaaacctcaagacttcagtggcgtaacagaacaaaacttgacttctcattcatgtgacgtgtccagcatgagtgtacaggaaactcttcacagttactcaggaactgaggctgatagaaactccatcttaatatggtactgccatgaccattttgattaaatgaaaagatagtggtcaagtggacactggcttttcaagtttctgtcccactatggcacatgccactttcattcacattttcattggccaaagcaagtcacatagccatgcctaactttaaagaaggttagagaatttcagtgttagcatatgtctgggaagcaaagagccagaaatatttggtgcatagcactaatgactact

SEQ ID NO: 97682 - DNA, 16158 bp, Homo sapiens
gacagggtttcaccatgttggccaggttggtctcgaactcctgacctcaggtgatccaaccgcctcagcctcccaaagtgctgggattacaggtgtgagccactgcacccagccaaatgtgggagcgtttgagcacgcaagtgtgctcgagtgagaatgcttgagcatgtgagtgtgatcgtgtgtgggcagtgtgtgagtgtgtgagtgtgtgtatacgagtatgaaagaacctgagtgtgaggatatgagatggctgggtgtgaatgagtgtgagtgggcacacaagtgtaagcctgacagtgtgctgtgtgagatggggcatctcgctatgttgcccaggctggtcttgaactcctgggctctggcagctgtgggtgctggcagcgtgttcacctgtgtacccctgtgtgtgtggccaggatgaggggtctcagggcacagatgataacctgagctagattgcaaatgacagtgggcactcctgtacctacaaatgtgtgtctctatgcagttggacaggtacagatgcctccctaggttagggcctccgggacacaggaacacgcattgtgcacacccagccccctccccgtgccctccgccacacccacatcacccccacctggtcgcgtccgtgccagagacaaaccagttaggtggcccccgagaacagagaggcccattgttcatggctgctaatcagccctgcctgctgggccccctccgccaatggccccccgatttcctgccctccaccagagctctaggtggggagagtctgaagctccaaggcctccagggggtcctgtgaccaggccatgctggggctaggcccttggtagaaacagaccaccacagcccaagacttgttccaatccaatggggaaactgagtcacaccactccaagacttgaatgtgtgggcaagcagggtggagggggtccagagaggtccggggcccgggtaggtttcctgcctgtctccccctcctaccaccagcattcaaatgctggctctatgaccttggacaagtcacttcccacctctggacctgtttcccattcatgcagtggggataagggtattacttgcagccaggcgcagtggctcatgcctgtaatcccagcactttgggaagccaaggcaggaggctcgcttgagcccaggagttcaagaccagcctgggcaacatgatgagacatcgtctctacaaaaaatataaaaattggtcaggtgtggtggctcacgcctgtaatcccagcacttggggaggccaaagcgggtggatcacctgaggtcaggagttcaagactaacctgaccaacatggtgaaaccccatctctactaaaaatacaaaaaattagccaggcgtggtggcacatgcctgtagtcccagctacttgggaggctgaagcaggagaattgcttgaacttgggaggtggaggttgcagtgagccgagatcatgtcattgcactccagcctgggcaacaagagcaaaattccatctcaaaaataaataaaaattttaaaaaataaataaaaattggctgggtgtggtggtgcatgcctgtggtcccagttacttgggaggctgaggtgggaggatcacctgagctgggtaggttgaggctgcagtgggcgctgtgattgcaccactgtactccagcctgggcaacagagtgagatcctgtctcaagaaagaaaaaaaaaagtgggggtattacctgcttcttaggacgcttgtaaggttggaatgactgtatctgtgttaagtttgtaaaatggggttggacataaagtaggtgatcattaagaataaaggggatgatggccaggcacggtggctctcgcctgtaatcccagcactttgggaggctgaggcgggtggatcacaaggtcaggagatcgagaccatcctggctaacatggtgaaaccctgtctctactaaaaatacaaaaatttagctgggcgtggtggcagacgcctgtagtcccagctactcaggaggctgaggcaggagaatggcgtgaacctgggaggcggaggttgcagtgagccaagattgtgccactgcactccagcctgggcgacagagcaagactccgtctcaaaaaaaaaaaaaaaaaattgccgggcacggtggctcacgcctgtaatcccagcacttttggaggctgaggtgggtatatcacaaggtgaggagatcaagaccatcctggctaacacggtgaaaccctgtctctactaaaaatacaaaaaattagctgggtgtggtggcgggcgcctgtagtcccagctactctggaggctgaggcaggagaatcgcttgaacccaggaggcggaggttgcagtgagccgagatcgcgccactacactcagcctgggcgacagagtgagactccgtctcaaaaaaaaaaaaaaaattacttagacatggtggcacattcctttaatcccagctacttgggaggctgaggcaggagaatcgcttgaacccaggaggtggaggttacagtgagccgagatcgcaccactgtgctccacactccagcctgggcaacagagtgaaactctgtctcaaaaaaaaaaaaaaaaaaaaaaaaaaggaataaaggggatgggtttgacatctgacaaaatgctgctgctgccatccgcttctgcaaaacctcaagaatgaaatgtccttcccatggcccacacgaggccctgcacgagctgcttcatccccttccaaacctcctctcctctctcttcccctcctcactctgctcagacacacgggcctcctcactgttcctccaacacgccacgtgtggtctgccccagggcctttgcacaggccatgcctctgcctggaacacctgcccccagattctcctatggctgacttctcacacttgggtcttagtgcatgcatcacctcctcagggagggccccctgcccacccccagtgaatctagccccattcaggacagtcatctttattatgcactgattgtatactaagcccagagacttcaactgtggtttctttttcatcctcccaataaatccatccatccatccgttcactcagacatgaaattctggaccctccaattcaggatctgggccacccagtgcctagctttttttttttttttttttttttttttgcgacagagtttcattctgtcacccaggctggagtgcagtggtgcaatctcagctcactgcaacctccgcctcccgggttcaagcgattctcctgcctcagcctcccgagtagctgggattacaggtgtgccaccacgcccggctaatttttgtatttgtagtagagacggggtttcaccatattggccagactggtcttgaacacctgacctcaggtgatctgccctcctcagcctcccaaagtgctgggattactacaggcatgagccactgcacccgtcagcctagcttctttgtgttcattcattcattcattcattcattcatcattcagcaaatgtctatgagcgcctactctgagccactgaaccagctgggctggccctgggggagaatcgacttcccctgcaaattcactctcatcagatccccaggctggtctaggatttgtttagatgccctcacgttggggaactcattccttactaagaataaccaccaccaataccaaacagtctcaagtaccaccaatagtgctgagttctcagggtgactacagcatctgctcccaagcccagcccagcccatatggtgtgtgctgtgtcaaagaacctgggttcaaatcccatgtccttttctaacccttggacaagcccctacccattttgtgcctcggtttccctagctgtaaaatggagatagtagtgcctctcttgtgggctcagcaccaggcctgttacacagctggtgcttaataaatgtgtcctgttacttaaggtctgatatgtgtagctcctgtcgtcgccgtccatgggggtgagtggggtggggaaggggtggtttgagtttctgcacatcaggacacgaggcgcggtccatgcaaatgaaatgcaaatcccatgcaaataaatctctgggtggtgcaaggctggaggtacaaggtgcacgcatttggggggcgcctgggaaccccatgaatcgagcccaggcccggaggtgctgacccgcatccagcccggctttcagtgctcggtgtaaatgtttacacctggccggccgccaggctccacgccgccccacactaggcagccaggagggggaatgtaaactcgggctgggggccgcgggacgctcgggaggagcccagacggagtcgagtgtggtgggcgtgtacacgtgagttattaaacaccgactgtatgcagtgaggaggatgccaccaggcactcacagcaccaagtaactggtgcccgaatgggtaaagctcagggcattcctgggggcccactagcgcccctgcaccagccagaggttgaagtgaatagggtaggcagccatggaaggctccctggaggaggcaccctccaaggtgagattgcaaggggagtgagagctaggtacagtgactcacgcctgtaatcccagctctttgggaggccaaagtggaaggatagcttgagcccaggagtttgagaccagcctgggcaacgttgtgagattcccctctctattaaacaaaaacaaaaacaaaaaaaattaaaaattagccaggcatggtggctcatgcctgtagtcagtcctagctacttgggaggctgaggtgggaggatcgcttgagcctaggaggtggaggctgcagtgagctgtgatcacaccactgcactccagcctgggtgacagagcaagaccctgtctcaaaaaaaaagaaagagagagagagaaagaaagaaaggaaagaaaggaagagaaaagagagagaagaaagaaagaaaaaggaaagaaagaagagaaagagagagaggaggctgggtgcggtggctcatgcctgtaatcccagcactttgggaggccaaggtgggcggatcacttgagttcaggagcttgagaccagcatagctaacagggagaaaccctgtctctattaaaaatacaaaaattagccagtcatgctggcaggtgcctgtaatcccagctactcagggggctgaggccggagaatcgcttgaacccgggaggcagaggttgcagtgagctgagattgcgccactgcactccagcctgagggacaagagtgagactccatctccaaaagaaaaaaagaaaaagagaaagaaaggggagtgggagtggggagggagggaagaagtgttctccatgcaaggacctatctgtgcaaaagcccagagctgggactccatgtccagggcagctctggtccattgctgcccacttctgggcctgcttatccatctggatgggaaacaggctcagagaggggcagagtcaatggaggacaccagcatgtagggaacagtgtcagccccagattcctgcctccagactgtcctaaacaccaccctccccgcgcctttgtcccacactgccacctgccgggaatgacctctcctcctttcactcttccccctggctcctcagctgcagccgctccggcctccttgctgttcctgggatacgccacactcagtctggcctcggggcctttgcactggctgtgtcccctgcctgtgatgccattctcctctgcctggccaactcctacgtttattcaagtctggaccttgtcatcggctcctcaggaaggcactccgggacccccagatgggggcggttccctgtgactcctggcacggaggccaaccccttccttgttcaatggttccttgagggaccattcccatgtgattatcgaccattcggcaggcgttcaaagtcaaaggccccacactgagtcctggcccagcgccctgtgcccgttggctgctggagggacagacggggcgtgcggctgaccatcccgtgcccgcaggctgaggatgcagcgctggaaggcggcggccttggcctcagtgctctgcagctccgtgctgtccatctggatgtgtcgagagggcctgcttctcagccaccgcctcggacctgcgctggtccccctgcaccgcctgcctcgaaccctggaygcccggattgcccgcctggcccagtgtaagctcctcctctgtgtggggtcagatacccccaacgtaaggggtagaatttcaggcagtggagtgggaggtgggggggktgtcataggttttttaaagatagggccagccagcccccttgcagggaggcagggacagacatcctaaaagattattcagggcaaggcatggtggcgcctgcctataatcccagcactttgggaggctgagacaggaggatctcttgagcccaggagttcatgaccagccagggcaatgtagcgagaccgccatctctacaaaaaacttcagaaattagccaggtgtagtggcgcacgcctgtagttccagctacttgggaggctgaggtgggaggatcacttgagcccaagagttcaaggctgcattgagctatgattgcaccactatactccagcctgagcaacagagcaagattctgtctcaaaacattataataataaatacattttctaaaaaaagatggggtggagggaggttgcaaattcccccaatggcctggtggagctagggtgacttctgggaactggggtctttcggctcagctgtcacaaggaattaggctctgccctgaggtcccgtgggggccagatggagattagacctgggcattcgcctggttggcccccgcggcgcagcagggggggcggtgggaggagagagaggctggatctgaggtcccagtgacctgccccaggggacagggaccaaggggaggcgggagatggagcaggagctaaaaaccggaagaaaggcccagagattcgaaggggtgaggaggggtggagagaggagagacggggctgggggcacagacacgggcaaaagtgctgctatagggacacagaaatgcccaccctgagggcaagaccctcgcccaactccccaccaatccctaatgcctgccccaccgcaggtgctgtggggtgagggtggtgcgtgggccctgacccctgtgcccacgcacatgtccatgcgtgcgcctgcgcgggcatctgaggcgtggatgccggcagggtgcgtgtgcagcgcctttgggtgtgggccacgagtacgcccatgtgcgcgtctgcgcccgcccctgccagcccacacaatcctcttttcttgtccttacaatgcacaagggtggcctccagcacgagctccacttctgtcctcccaccacttccctctctgcaagcggcgtgaagtccttcctaggactctgggacagagacccgggcgggacccccaaaatccagtgctccaggacttggggtgcggggggcaaagcacgaatggaggaatttcaggcactgcggagggtcagggcccatgggcgggtgcctgtctgccctactgcaaaaagcgagtggccactgactccccaagtccccatgttctaggctcctggtggaatttcaggctggggaccttgtgttctagcccctgtgcaagcagccagccccgttgcagggaggcagggacagacatcctaaaagatgattcattgttgccaggtgcggtggctcacgcctgtgatcccagcactttgggaggccgaggtgggcggatcacgaggtcaggagatggagaccattctggctaacactgtgaaaccctgtctctactaaaattacaaaaaaattagccgggcgtggtggcgggcgcctgtagtcccagctactcgggaggctgaggcgggagaatggcgtgaacccgggaggcggagcttgcagtgagccgagatcgcgccactgcactccagcctgggcgacagagcgagactccgtctcaaaaaaaaaaaaaagattattcattgtttatatggaattcagatttagccgggcacctgtaytgtatcgggcaagcccacaaatgtctgcttcgatgcacccctctggggttgggtgtgccccctaaccccccagcacagtcctggccactccagtcctgctccggggcttaaagaacacggactaggttgctcagtcatcgcccaccccccgcaccgatttcccaccctctcagccccggccaagacagagatcatggaagcttcatgggacagacagggaaactgaggcctgaggttgcaagtggcgaaagtggcagagtcatgctctgaggctgggtttgtctcgtttctgagaccccctgtgggaacagacatctcctcccccaccaaaccccaggagacagacagcccctccttccccagggccacccagaggctcattcttttgacagccaggtgcaccagcccggggggcaggtggggactaaagatttcctctcccaaccacaagcgtgactgccacctgctctggggctgggagtcccctgcctgcaggtccgccagcagcgctgcctgtcattccagcgtctgcagttctctcccggggcttccgagtttgggggtggagccaccgcttgggtaataaatttaggctgccaggccctgggaatcggtgacttgggcacctcctggcgagtgtgggagaaagcggctggacctgggccaaacttgggtgaacgatgaaggcaggaagaatgacctttaagcccgcctctgtcgctctctctcggccacctgctaatgatgtgaccttgggatggtccgttttgtcacctgtcacatgggggtggccttgacagtagctgctgccactccatggagtggggtccccacacaggcttcggatgcagtaggctgcggtacctgctgctcctctgcattctgagaarcccaaacaccccgattcatttcttggatagggaaactgaggctccactgcacagcggggcagtggggatggagggagtctgaaaagcccggggcctcagagcagacgtcggggcctgaagagggggctctagagacctatgacaacctcactaaagagggatagggcatgggaagcagccccccagtgctgcccagagaggatgcaccagtgtcctggggcagcccagcataggggcggggtccagatagatttgcgatggaggacgaggagaatggagcagcaatggggtgagagaggggcccagaggaggtgagttagagaccccggtcagctcagctcaaggtgagacgggctggaaagcggcccagaaaggatggaccakgttctgggcagccaatataggctcagggttcagaaaggggttttggaccagcgtaggggtgtgagtgtgtacgtgccccccagtgccgcccagagagggtgcatgagcagctcagcaagagggtggggaaatttgggayctgggagtgagacgagawgccgtctaggcctggcgtcccagcaagggtcttcgtttgcaggggtacagagagggtagggggctccctcccaccccctgcacccactgaccccccctcctttctcttcctcccctcgcagaccgtgcactcctgcagggggccccggatgcgatggagctgcgcgagctgacgccctgggctgggcggcccccaggtccgcgccgtcgggcggggccccggcggcggcgcgcgcgtkcgcggttgggggcgcggccttgcgggctgcgcgagctggaggtgcgcgtgagcgagctgggcctgggctacgcgtccgacgagacggtgctgttccgctactgcgcaggcgcctgcgaggctgccgcgcgcgtctacgacctcgggctgcgacgactgcgccagcggcggcgcctgcggcgggagcgggtgcgcgcgcagccctgctgccgcccgacggcctacgaggacgaggtgtccttcctggacgcgcacagccgctaccacacggtgcacgagctgtcggcgcgcgagtgcgcctgcgtgtgaccctacctcactcggccggcgcggcggccactccccccgcctcgacggcaccactggccggccccgcgaaagactgcgcgtgcgtagagcacgccggcgcggccccgggactctcgcgataactgtactgagataaagtgtggcaactcgagctggctggtgattcatcctcggcgaggggctcgcgtgtgggccacgtcgccgtctccaccgggaaagcggggaccagtggggggggcccagctgcagggtagtgggaggatgctgtttgctttgggggaagggtagatgcaaagtgggtccagtttatggcggacaaaaaggaaaatggggtgaatggggctatgttggcagggaccgtccttcctgcctccctacgggtccctctgcccgtcccgagcgtgttccggtccgcacctcttcgctgtgtgggcttctggggaggggaaagggaagctacgctcggatgaagagaccgaggtctaggtggaccccgtttccccagcttgttcccttccgcacctctccgcggtgcgggcttctgggatgaagacactgaagtctaggtgggcccagtttccccagattgtcgctgactgcacctctcgcttctgggatgaagagactgaggtctaggtggacccagtttccccagcttgttcctgactgcacctctctgctgtgtggacttctggagagggggaaagggggagacactgtgggtgaggagcctgagatccaggtggaatcagttccccgctatgtgggtttctaggaagggggagccactctgggggtgaggagagtgaggtccaggtggacctgggcctcccttatccgacggcctcctcgggccggtcttcgcccaccagggtgagctgaaagccactatctccttccaccagctactaaaaatacccgcacgctgcccacctcccggcggggagaggcctggggcgggcgccagccccatccagcccgaagccggcgcctgctggtgtagagctgggtccccagagacctgggtcctcggcccataaaagccctggccgggcctccacgggggggatttacgacgagcccctgcggagtatggaaaaagcccggctcggtgtttagatttccccacggtgtcaccttgatgcttggcaggcctcgggtgttgggttgccagagcgcgggaggggtcggcgggtcccacggtcggtctgaggggcggggaaggggcgggcactgcgagcccagagcaggcaccggcgaggcgagactcctcccctcctgcccctcagactgggggttcccaaggctacaacccttctccttagctgggccccctcccctccttcccacacgtctgcccttaggaccaccctctaaccacagtgtcccttcccaggctcagcccgcatccccccaccccccgcaaagctggagggcgcagatcggaaaccgcccccagggagaatcacccagccatgaaggaacatccctagcccctggctcccggggacccacagctacagctggagacactcaaggcggctaatcagcaggacttccagggagccctgagagcagggcttggcggccaggcgggtgatctgcttgggaagcagtttcagggctgccgctggctggggtccccgcctacccccgcagtcttctgactctgaggtttaaggtggtggattcctccaccctttgggccgactcagcccggcctccgcagagaggccggagttcccagacgctgcggaagcccaagtgacgcttactccgagcctcagtttccccatcctagatggcctggcctcagagaggagtgttgttcagcccaggacacacagcgagaaagctgaccatcaggggtctgccgcccccccgaagctcccctgccacagtgtgcatgtgtgtgtgagtgttgcccaccctccggggcctcccggacctcggccttcctgtctcccacccagatccagcgtcccaaccacagggcgcgggcccagcccaccagggaattggaacataaataaaccgagaagcccctgcagttccctggggctgcggttgtcatcagcgcatcggcacaccggatgagggtctctctcacacacacacacaagcacactcacaagacacagagatcaccacccataagggctcagcaggcaggacccatgatcctacacagtcaccttccacacagaattgcacactcagaaagggacactcccccctttttttttttttcttgagacagtctcactgtgtcgcccaggttggagtgcagtggtgcgatcatggctccctacaacatctgcctcctgggttcaagcgattcttgtgtctcagccacctgggtagctgggattacaggcaccggccaccgcacccagctaattttttttttttttttttttttttttgagacagagtctcgctctgtcgccaggctggagtgcagtggcgcgatctcggcttactgcaacctccgactctctggttcaagcgattctcctgcctcagcttcccaagtagctgggattacaggcatgcaccaccacgcccagcaaatttttgtatttttagtagagacgggtttcaccatattggccaggatggtctcgatctcctgaccttgtgatccgcctgcctcggcctcccaaagtgctgggattacaggtgtgagccaccgcacccggcctcatcatcggttttctttgcagtattacatctggaaacggtgcggtgattatctctctgcacccctcacaggcggctaacaacatcacaaacaaatcagccagaaccatcactcatgggtggggccccatgggtgccagttcccagggcccagtgccctccagggtgaggtccccagcaggtgaggctcctagcaggtgagattcagtgtggaaggtctctgggagcaggtcccagcaggtaaagtccccaacagccgaggtccccagtaggcaaagtccccaggagacatccccagcaggccaggcttccgcaggggacgctcctggaagccagcatgtgaaatcccaggtaagggacatacctggccaccgaagactccagcaggtgaggccccaggaaagtgaggacccaggtaggtgaatccccaggcaggtgaagctgcaacaggtgaccgtcccaggcaggtgagtcctcaggcaggtgaagcttcaggcaaacgagtccttaggtagatgaggcccccactcaggtgaggccccaggaaaatgaggttcctggcagcccaggccccacaccagcctctcaggtgaaccaagccgctatgccgcgtgtctggtacctggattcctcctgcagtttccagcaggccttgcagaaagcgagtgcccagctgaaggagcgaggccgcagcgtctcccgccagcgaaagtagctcaggtagcgggcgtggtccttgtccagctcctgcaggtaccgggccaggtccttggggctctggaagtcgtccacgtggatgaaggcgtcgggtggcaggaacctctcgtagttgcttctgctggggcccagcaccacgggcacggcccaggcctccagggcgttcctccacagcttctcggtgatgtagtcggggtgcaaggagttctcgaaggccagatagaacttgtaccgggacagcgtctccatcatggttccctggggcaggggcttgtgggagcgtccgtacacgtccaccttgagatgggcctgcaggctctggtagtagcgcaccctggcggagtttggcccccagttggacactgcccaggccaccagctcggtcttggccgagaggttgagcggtgggtgggcaggctggccggaccacggctccagccagccgtagggcgtgaagatgtcggagtcgctgcggtaggacatggtgagattgaagtatccgtccatggctttcagctgccagcagtggcttggggactccatgctgaaccagatccatcgctgcccctgccgcctcggggagcgtgggagctgggcactggggttgtacatgacctctcggtggtgcacgatgaccgcgtctgcctgtggatacaccttgcggtcggcagtgatgttgcagtcagccgtgccaggcaccatctctgagcagcggggcagagctatgggtttgttaaaaggccacgtccacagcaggatcagggggatggagtgggcgggggtccctgtgctgtctgggaagcgggacccattagggtacacagtgggatcgtcttgagacacacgcagataggagaagaaacacacagccatcagcagctgaaacagcagcgtggtcagacagcagcgccacgaccactgtggcttggccgggcccaggggatccatgggtcagagtatctgggaagtggggagagaggagtgagggtcattgatgacaatctcctgcttaccaaagctccaggccatgagtcctgagaagagctgttattattcctgttacacagatgagaaaactgagaccaagtgactcacagcaaaagtcagcacagctggtgtttgaacaaagggagcttggcccagagtccacttcctcccacccattagacaacaggccctttctacatgggcaagggtccctggggaagttgggagaggccccaagggccctcaggtcccaccttgatcctgtccttttctggtgtgtccccagactcttcctcaatctggagagaagacacagccgatcataaatgccccccagtgcccctgagtcgaggcttgaacccatgactctgctggggaagggcacaatgggattgggttttggaggtaatataagagctcaccagatagagtagacctgtgggaaagggtgctcctggcagaggaaaccaccattgccaaggcctagtggggagagacccctgagcagtttgcagagaaagcaaaggaagtactcagggctgccagtgtcgagttcatattagattggtgcaaaagtaattgctgtttttaccattgaaagtaatggcagccatgcgcggtggttcatgcctgtaatcccagcactttgggaagccgaggcgggcagatcacgaggtcaagagaccagcctggccaacgtggtgaaaccccatctctactaaaaatgcaaaaattggccgggcgtggtggcgtgtgcctgtaatcccagctacttgagaggctgaggcaggagaattgcttgaacctggggggtggaggttgcagtgagccgagatcgcaccgctgcactccagcctgggcaatggaattctatcttggaaaaaaaaaaaaaaagaaatattaacttgggtcaagcacggtggctcatgcctataatcctagcactttgggaggctgaaggtggatcacttgaggtcaggagttcgaggccagcctggccaacgtggtgaaacccatctttactaaaaatacaaaaattagctgggcgtggtggcgggcacctgtaatcccagctacttaggagcctgaggcaggagaatcacttgaacccgggaggaggaggttgcagggagccaagatggcaccactgcactccagcctgggacacagaatgagattccatctccaaaaaaaaaaaaaagaaagaaatattcactcggggtttcattcaataagcactcagggccgggtgcattggctcacgactgtattcccagcactttggaaggcagaggagggcggataacttgaggtcaagagtttgagaccagcgtggtcaacatggagaacccacatgtctactaaaaatacaacaattagctgggcatggtggcacatgcctgtagtcccagctactcgggagacagagacatgagcatcacttgaacctgggaagcagaggttgcattgagccaagatcacaccattgcactccaacctgggtgacagagcgagaccctgtctcaaaaagaaaaaaaaaagagagaatagaaatattcactcagggtttctttcaacaagcacccaaaggttactcctctggtaggctgacgctgggggagaggtggggacagataggagggagaataggcaggcgtggggactcacatgctgaccaggagggcagtggggccacccagagacatggggaacccccaggagagaagcaggctttggtggaac
